United States Patent Application Publication US 2019/0112353 A1 - sequence listing, part 2

SEQ ID NO: 31595 - DNA, 22 bp, Artificial Sequence
  chemically synthesized
accgttgtccttcagggatgtc

SEQ ID NO: 31596 - DNA, 22 bp, Artificial Sequence
  chemically synthesized
tccttcagggatgtcctagaaa

SEQ ID NO: 31597 - DNA, 22 bp, Artificial Sequence
  chemically synthesized
cagggatgtcctagaaaggggc

SEQ ID NO: 31598 - DNA, 22 bp, Artificial Sequence
  chemically synthesized
agggatgtcctagaaaggggct

SEQ ID NO: 31599 - DNA, 22 bp, Artificial Sequence
  chemically synthesized
gaaaggggctgtagtgctgcgg

SEQ ID NO: 31600 - DNA, 22 bp, Artificial Sequence
  chemically synthesized
tagtgctgcggctgtccacttt

SEQ ID NO: 31601 - DNA, 22 bp, Artificial Sequence
  chemically synthesized
cggctgtccacttttgggtggt

SEQ ID NO: 31602 - DNA, 22 bp, Artificial Sequence
  chemically synthesized
tccacttttgggtggtgcctgc

SEQ ID NO: 31603 - DNA, 22 bp, Artificial Sequence
  chemically synthesized
ttgggtggtgcctgcatatcgt

SEQ ID NO: 31604 - DNA, 22 bp, Artificial Sequence
  chemically synthesized
tgggtggtgcctgcatatcgtg

SEQ ID NO: 31605 - DNA, 22 bp, Artificial Sequence
  chemically synthesized
gggtggtgcctgcatatcgtgc

SEQ ID NO: 31606 - DNA, 22 bp, Artificial Sequence
  chemically synthesized
ggtggtgcctgcatatcgtgca

SEQ ID NO: 31607 - DNA, 22 bp, Artificial Sequence
  chemically synthesized
catatcgtgcagaactatctgt

SEQ ID NO: 31608 - DNA, 22 bp, Artificial Sequence
  chemically synthesized
tctgtgaaccaggacctagtct

SEQ ID NO: 31609 - DNA, 22 bp, Artificial Sequence
  chemically synthesized
tgaaccaggacctagtcttctc

SEQ ID NO: 31610 - DNA, 22 bp, Artificial Sequence
  chemically synthesized
gtcttctcttcctctgtcagct

SEQ ID NO: 31611 - DNA, 22 bp, Artificial Sequence
  chemically synthesized
ctcttcctctgtcagctgatca

SEQ ID NO: 31612 - DNA, 22 bp, Artificial Sequence
  chemically synthesized
tcttcctctgtcagctgatcat

SEQ ID NO: 31613 - DNA, 22 bp, Artificial Sequence
  chemically synthesized
ttcctctgtcagctgatcatag

SEQ ID NO: 31614 - DNA, 22 bp, Artificial Sequence
  chemically synthesized
cctctgtcagctgatcataggg

SEQ ID NO: 31615 - DNA, 22 bp, Artificial Sequence
  chemically synthesized
ctctgtcagctgatcataggga

SEQ ID NO: 31616 - DNA, 22 bp, Artificial Sequence
  chemically synthesized
tgtcagctgatcatagggaact

SEQ ID NO: 31617 - DNA, 22 bp, Artificial Sequence
  chemically synthesized
tcagctgatcatagggaactcc

SEQ ID NO: 31618 - DNA, 22 bp, Artificial Sequence
  chemically synthesized
atcatagggaactccccatgag

SEQ ID NO: 31619 - DNA, 22 bp, Artificial Sequence
  chemically synthesized
cccatgagaccatcggtgcagt

SEQ ID NO: 31620 - DNA, 22 bp, Artificial Sequence
  chemically synthesized
agggagagaaagcagtgtgtca

SEQ ID NO: 31621 - DNA, 22 bp, Artificial Sequence
  chemically synthesized
gagcccctttctcatgtaactt

SEQ ID NO: 31622 - DNA, 22 bp, Artificial Sequence
  chemically synthesized
agcccctttctcatgtaactta

SEQ ID NO: 31623 - DNA, 22 bp, Artificial Sequence
  chemically synthesized
tctcatgtaacttactagtgcc

SEQ ID NO: 31624 - DNA, 22 bp, Artificial Sequence
  chemically synthesized
ctcatgtaacttactagtgcct

SEQ ID NO: 31625 - DNA, 22 bp, Artificial Sequence
  chemically synthesized
tcatgtaacttactagtgcctt

SEQ ID NO: 31626 - DNA, 22 bp, Artificial Sequence
  chemically synthesized
atgtaacttactagtgccttca

SEQ ID NO: 31627 - DNA, 22 bp, Artificial Sequence
  chemically synthesized
actagtgccttcaggatctgct

SEQ ID NO: 31628 - DNA, 22 bp, Artificial Sequence
  chemically synthesized
ctagtgccttcaggatctgctc

SEQ ID NO: 31629 - DNA, 22 bp, Artificial Sequence
  chemically synthesized
gtgccttcaggatctgctcaag

SEQ ID NO: 31630 - DNA, 22 bp, Artificial Sequence
  chemically synthesized
caggatctgctcaagcccaatc

SEQ ID NO: 31631 - DNA, 22 bp, Artificial Sequence
  chemically synthesized
aggatctgctcaagcccaatcg

SEQ ID NO: 31632 - DNA, 22 bp, Artificial Sequence
  chemically synthesized
ctcaagcccaatcgcatatata

SEQ ID NO: 31633 - DNA, 22 bp, Artificial Sequence
  chemically synthesized
aagcccaatcgcatatatacca

SEQ ID NO: 31634 - DNA, 22 bp, Artificial Sequence
  chemically synthesized
ccatttgctgatgcaatgctgc

SEQ ID NO: 31635 - DNA, 22 bp, Artificial Sequence
  chemically synthesized
catttgctgatgcaatgctgct

SEQ ID NO: 31636 - DNA, 22 bp, Artificial Sequence
  chemically synthesized
gctgatgcaatgctgctgtgca

SEQ ID NO: 31637 - DNA, 22 bp, Artificial Sequence
  chemically synthesized
ctgatgcaatgctgctgtgcac

SEQ ID NO: 31638 - DNA, 22 bp, Artificial Sequence
  chemically synthesized
atgcaatgctgctgtgcacagc

SEQ ID NO: 31639 - DNA, 22 bp, Artificial Sequence
  chemically synthesized
ctgtgcacagcccactttatgg

SEQ ID NO: 31640 - DNA, 22 bp, Artificial Sequence
  chemically synthesized
tgcacagcccactttatggcta

SEQ ID NO: 31641 - DNA, 22 bp, Artificial Sequence
  chemically synthesized
tatggctagatggatcagaaag

SEQ ID NO: 31642 - DNA, 22 bp, Artificial Sequence
  chemically synthesized
atggctagatggatcagaaagc

SEQ ID NO: 31643 - DNA, 22 bp, Artificial Sequence
  chemically synthesized
tggctagatggatcagaaagca

SEQ ID NO: 31644 - DNA, 22 bp, Artificial Sequence
  chemically synthesized
gatggatcagaaagcacccagt

SEQ ID NO: 31645 - DNA, 22 bp, Artificial Sequence
  chemically synthesized
atgataggcagttcaggtcaca

SEQ ID NO: 31646 - DNA, 22 bp, Artificial Sequence
  chemically synthesized
aggtcacatggtgacttgatga

SEQ ID NO: 31647 - DNA, 22 bp, Artificial Sequence
  chemically synthesized
gatgactcatagtcaaatattt

SEQ ID NO: 31648 - DNA, 22 bp, Artificial Sequence
  chemically synthesized
atgactcatagtcaaatatttc

SEQ ID NO: 31649 - DNA, 22 bp, Artificial Sequence
  chemically synthesized
atagtcaaatatttcgtttcca

SEQ ID NO: 31650 - DNA, 22 bp, Artificial Sequence
  chemically synthesized
cgtttccaccaaagcccagtaa

SEQ ID NO: 31651 - DNA, 22 bp, Artificial Sequence
  chemically synthesized
gtttccaccaaagcccagtaac

SEQ ID NO: 31652 - DNA, 22 bp, Artificial Sequence
  chemically synthesized
ccaccaaagcccagtaacaggc

SEQ ID NO: 31653 - DNA, 22 bp, Artificial Sequence
  chemically synthesized
caccaaagcccagtaacaggcc

SEQ ID NO: 31654 - DNA, 22 bp, Artificial Sequence
  chemically synthesized
tctccctaaaagagagtagtta

SEQ ID NO: 31655 - DNA, 22 bp, Artificial Sequence
  chemically synthesized
ctccctaaaagagagtagttat

SEQ ID NO: 31656 - DNA, 22 bp, Artificial Sequence
  chemically synthesized
tccctaaaagagagtagttatc

SEQ ID NO: 31657 - DNA, 22 bp, Artificial Sequence
  chemically synthesized
cctaaaagagagtagttatctg

SEQ ID NO: 31658 - DNA, 22 bp, Artificial Sequence
  chemically synthesized
aaagagagtagttatctgcaga

SEQ ID NO: 31659 - DNA, 22 bp, Artificial Sequence
  chemically synthesized
tctgcagaagatggcagggcct

SEQ ID NO: 31660 - DNA, 22 bp, Artificial Sequence
  chemically synthesized
cagaagatggcagggccttgct

SEQ ID NO: 31661 - DNA, 22 bp, Artificial Sequence
  chemically synthesized
gctccaaaatcctagaggcctc

SEQ ID NO: 31662 - DNA, 22 bp, Artificial Sequence
  chemically synthesized
ctccaaaatcctagaggcctcc

SEQ ID NO: 31663 - DNA, 22 bp, Artificial Sequence
  chemically synthesized
caaaatcctagaggcctccgct

SEQ ID NO: 31664 - DNA, 22 bp, Artificial Sequence
  chemically synthesized
gaggcctccgctgtgattcagc

SEQ ID NO: 31665 - DNA, 22 bp, Artificial Sequence
  chemically synthesized
cgctgtgattcagcctgccaaa

SEQ ID NO: 31666 - DNA, 22 bp, Artificial Sequence
  chemically synthesized
tgattcagcctgccaaatgctc

SEQ ID NO: 31667 - DNA, 22 bp, Artificial Sequence
  chemically synthesized
agcctgccaaatgctccaaaca

SEQ ID NO: 31668 - DNA, 22 bp, Artificial Sequence
  chemically synthesized
ccaaatgctccaaacagcatcc

SEQ ID NO: 31669 - DNA, 22 bp, Artificial Sequence
  chemically synthesized
caaacagcatccctatctggca

SEQ ID NO: 31670 - DNA, 22 bp, Artificial Sequence
  chemically synthesized
tctggcactgacacctcaagca

SEQ ID NO: 31671 - DNA, 22 bp, Artificial Sequence
  chemically synthesized
gcactgacacctcaagcatcat

SEQ ID NO: 31672 - DNA, 22 bp, Artificial Sequence
  chemically synthesized
acacctcaagcatcattggatc

SEQ ID NO: 31673 - DNA, 22 bp, Artificial Sequence
  chemically synthesized
aagcatcattggatctgctagg

SEQ ID NO: 31674 - DNA, 22 bp, Artificial Sequence
  chemically synthesized
gatctgctaggtcatatggccc

SEQ ID NO: 31675 - DNA, 22 bp, Artificial Sequence
  chemically synthesized
ctaggtcatatggcccaagtgg

SEQ ID NO: 31676 - DNA, 22 bp, Artificial Sequence
  chemically synthesized
ggtcatatggcccaagtggcat

SEQ ID NO: 31677 - DNA, 22 bp, Artificial Sequence
  chemically synthesized
gcacagcagcctggacctgtgg

SEQ ID NO: 31678 - DNA, 22 bp, Artificial Sequence
  chemically synthesized
cacagcagcctggacctgtggc

SEQ ID NO: 31679 - DNA, 22 bp, Artificial Sequence
  chemically synthesized
gacctgtggcagagccttctgt

SEQ ID NO: 31680 - DNA, 22 bp, Artificial Sequence
  chemically synthesized
tggcagagccttctgttctgga

SEQ ID NO: 31681 - DNA, 22 bp, Artificial Sequence
  chemically synthesized
ctgttctggactccactcaaaa

SEQ ID NO: 31682 - DNA, 22 bp, Artificial Sequence
  chemically synthesized
tgttctggactccactcaaaac

SEQ ID NO: 31683 - DNA, 22 bp, Artificial Sequence
  chemically synthesized
ttctggactccactcaaaactg

SEQ ID NO: 31684 - DNA, 22 bp, Artificial Sequence
  chemically synthesized
tggactccactcaaaactggca

SEQ ID NO: 31685 - DNA, 22 bp, Artificial Sequence
  chemically synthesized
gactccactcaaaactggcagc

SEQ ID NO: 31686 - DNA, 22 bp, Artificial Sequence
  chemically synthesized
cactcaaaactggcagcctttt

SEQ ID NO: 31687 - DNA, 22 bp, Artificial Sequence
  chemically synthesized
aaaactggcagccttttggatc

SEQ ID NO: 31688 - DNA, 22 bp, Artificial Sequence
  chemically synthesized
gcagccttttggatcactcgat

SEQ ID NO: 31689 - DNA, 22 bp, Artificial Sequence
  chemically synthesized
ttggatcactcgataaatgggc

SEQ ID NO: 31690 - DNA, 22 bp, Artificial Sequence
  chemically synthesized
tggatcactcgataaatgggcc

SEQ ID NO: 31691 - DNA, 22 bp, Artificial Sequence
  chemically synthesized
ggatcactcgataaatgggcca

SEQ ID NO: 31692 - DNA, 22 bp, Artificial Sequence
  chemically synthesized
gatcactcgataaatgggccag

SEQ ID NO: 31693 - DNA, 22 bp, Artificial Sequence
  chemically synthesized
gataaatgggccagagtaacac

SEQ ID NO: 31694 - DNA, 22 bp, Artificial Sequence
  chemically synthesized
cctccaaaatccaaataggccc

SEQ ID NO: 31695 - DNA, 22 bp, Artificial Sequence
  chemically synthesized
caaaatccaaataggcccacta

SEQ ID NO: 31696 - DNA, 22 bp, Artificial Sequence
  chemically synthesized
ggcgttgtgcctatttcttggt

SEQ ID NO: 31697 - DNA, 22 bp, Artificial Sequence
  chemically synthesized
tgcctatttcttggttgtaaga

SEQ ID NO: 31698 - DNA, 22 bp, Artificial Sequence
  chemically synthesized
tttcttggttgtaagagtggcc

SEQ ID NO: 31699 - DNA, 22 bp, Artificial Sequence
  chemically synthesized
cttggttgtaagagtggccaaa

SEQ ID NO: 31700 - DNA, 22 bp, Artificial Sequence
  chemically synthesized
ttggttgtaagagtggccaaat

SEQ ID NO: 31701 - DNA, 22 bp, Artificial Sequence
  chemically synthesized
ggttgtaagagtggccaaatgc

SEQ ID NO: 31702 - DNA, 22 bp, Artificial Sequence
  chemically synthesized
gttgtaagagtggccaaatgca

SEQ ID NO: 31703 - DNA, 22 bp, Artificial Sequence
  chemically synthesized
taagagtggccaaatgcagcaa

SEQ ID NO: 31704 - DNA, 22 bp, Artificial Sequence
  chemically synthesized
tccttcactttagaaggaatat

SEQ ID NO: 31705 - DNA, 22 bp, Artificial Sequence
  chemically synthesized
cactttagaaggaatatctcaa

SEQ ID NO: 31706 - DNA, 22 bp, Artificial Sequence
  chemically synthesized
actttagaaggaatatctcaaa

SEQ ID NO: 31707 - DNA, 22 bp, Artificial Sequence
  chemically synthesized
tagaaggaatatctcaaagagc

SEQ ID NO: 31708 - DNA, 22 bp, Artificial Sequence
  chemically synthesized
agaaggaatatctcaaagagcc

SEQ ID NO: 31709 - DNA, 22 bp, Artificial Sequence
  chemically synthesized
gaaggaatatctcaaagagccc

SEQ ID NO: 31710 - DNA, 22 bp, Artificial Sequence
  chemically synthesized
aaagagccccaaaccattggac

SEQ ID NO: 31711 - DNA, 22 bp, Artificial Sequence
  chemically synthesized
gacccctataaattttactgag

SEQ ID NO: 31712 - DNA, 22 bp, Artificial Sequence
  chemically synthesized
taaattttactgaggtagaagg

SEQ ID NO: 31713 - DNA, 22 bp, Artificial Sequence
  chemically synthesized
tactgaggtagaaggtccctga

SEQ ID NO: 31714 - DNA, 22 bp, Artificial Sequence
  chemically synthesized
actgaggtagaaggtccctgaa

SEQ ID NO: 31715 - DNA, 22 bp, Artificial Sequence
  chemically synthesized
ctgaggtagaaggtccctgaat

SEQ ID NO: 31716 - DNA, 22 bp, Artificial Sequence
  chemically synthesized
aggtagaaggtccctgaattta

SEQ ID NO: 31717 - DNA, 22 bp, Artificial Sequence
  chemically synthesized
aatttaatcagatttatttccc

SEQ ID NO: 31718 - DNA, 22 bp, Artificial Sequence
  chemically synthesized
aatcagatttatttcccatcct

SEQ ID NO: 31719 - DNA, 22 bp, Artificial Sequence
  chemically synthesized
atcagatttatttcccatcctc

SEQ ID NO: 31720 - DNA, 22 bp, Artificial Sequence
  chemically synthesized
atttcccatcctctgtcccaca

SEQ ID NO: 31721 - DNA, 22 bp, Artificial Sequence
  chemically synthesized
tttcccatcctctgtcccacaa

SEQ ID NO: 31722 - DNA, 22 bp, Artificial Sequence
  chemically synthesized
cccatcctctgtcccacaaatg

SEQ ID NO: 31723 - DNA, 22 bp, Artificial Sequence
  chemically synthesized
ccatcctctgtcccacaaatgt

SEQ ID NO: 31724 - DNA, 22 bp, Artificial Sequence
  chemically synthesized
tgtcccacaaatgtctcatcaa

SEQ ID NO: 31725 - DNA, 22 bp, Artificial Sequence
  chemically synthesized
tcccacaaatgtctcatcaata

SEQ ID NO: 31726 - DNA, 22 bp, Artificial Sequence
  chemically synthesized
atcaataaatccagtgtgtttg

SEQ ID NO: 31727 - DNA, 22 bp, Artificial Sequence
  chemically synthesized
gctacttcttgctcactagttc

SEQ ID NO: 31728 - DNA, 22 bp, Artificial Sequence
  chemically synthesized
ctacttcttgctcactagttcc

SEQ ID NO: 31729 - DNA, 22 bp, Artificial Sequence
  chemically synthesized
cttcttgctcactagttccagt

SEQ ID NO: 31730 - DNA, 22 bp, Artificial Sequence
  chemically synthesized
cttgctcactagttccagtcag

SEQ ID NO: 31731 - DNA, 22 bp, Artificial Sequence
  chemically synthesized
ttgctcactagttccagtcagc

SEQ ID NO: 31732 - DNA, 22 bp, Artificial Sequence
  chemically synthesized
gctcactagttccagtcagcat

SEQ ID NO: 31733 - DNA, 22 bp, Artificial Sequence
  chemically synthesized
ctcactagttccagtcagcatg

SEQ ID NO: 31734 - DNA, 22 bp, Artificial Sequence
  chemically synthesized
actagttccagtcagcatgtca

SEQ ID NO: 31735 - DNA, 22 bp, Artificial Sequence
  chemically synthesized
gttccagtcagcatgtcatcaa

SEQ ID NO: 31736 - DNA, 22 bp, Artificial Sequence
  chemically synthesized
cagtcagcatgtcatcaatgta

SEQ ID NO: 31737 - DNA, 22 bp, Artificial Sequence
  chemically synthesized
tgatatcttgtggaagtgaaag

SEQ ID NO: 31738 - DNA, 22 bp, Artificial Sequence
  chemically synthesized
gtggaagtgaaaggtgagcaag

SEQ ID NO: 31739 - DNA, 22 bp, Artificial Sequence
  chemically synthesized
tggaagtgaaaggtgagcaagt

SEQ ID NO: 31740 - DNA, 22 bp, Artificial Sequence
  chemically synthesized
tctccaaataagattatggcac

SEQ ID NO: 31741 - DNA, 22 bp, Artificial Sequence
  chemically synthesized
tccaaataagattatggcacaa

SEQ ID NO: 31742 - DNA, 22 bp, Artificial Sequence
  chemically synthesized
caaataagattatggcacaaag

SEQ ID NO: 31743 - DNA, 22 bp, Artificial Sequence
  chemically synthesized
tggcacaaagctggagagttga

SEQ ID NO: 31744 - DNA, 22 bp, Artificial Sequence
  chemically synthesized
gagagttgatatactcctgagt

SEQ ID NO: 31745 - DNA, 22 bp, Artificial Sequence
  chemically synthesized
atatactcctgagttcatcatt

SEQ ID NO: 31746 - DNA, 22 bp, Artificial Sequence
  chemically synthesized
ctgagttcatcattttctttca

SEQ ID NO: 31747 - DNA, 22 bp, Artificial Sequence
  chemically synthesized
agttcatcattttctttcatca

SEQ ID NO: 31748 - DNA, 22 bp, Artificial Sequence
  chemically synthesized
atcattttctttcatcactttg

SEQ ID NO: 31749 - DNA, 22 bp, Artificial Sequence
  chemically synthesized
tctttcatcactttgtccagcg

SEQ ID NO: 31750 - DNA, 22 bp, Artificial Sequence
  chemically synthesized
ctttcatcactttgtccagcga

SEQ ID NO: 31751 - DNA, 22 bp, Artificial Sequence
  chemically synthesized
tttcatcactttgtccagcgaa

SEQ ID NO: 31752 - DNA, 22 bp, Artificial Sequence
  chemically synthesized
tcatcactttgtccagcgaact

SEQ ID NO: 31753 - DNA, 22 bp, Artificial Sequence
  chemically synthesized
catcactttgtccagcgaactt

SEQ ID NO: 31754 - DNA, 22 bp, Artificial Sequence
  chemically synthesized
atcactttgtccagcgaactta

SEQ ID NO: 31755 - DNA, 22 bp, Artificial Sequence
  chemically synthesized
tgtccagcgaacttacaagcaa

SEQ ID NO: 31756 - DNA, 22 bp, Artificial Sequence
  chemically synthesized
gtccagcgaacttacaagcaac

SEQ ID NO: 31757 - DNA, 22 bp, Artificial Sequence
  chemically synthesized
tccagcgaacttacaagcaacc

SEQ ID NO: 31758 - DNA, 22 bp, Artificial Sequence
  chemically synthesized
acaagcaaccaaccaacttcac

SEQ ID NO: 31759 - DNA, 22 bp, Artificial Sequence
  chemically synthesized
caagcaaccaaccaacttcact

SEQ ID NO: 31760 - DNA, 22 bp, Artificial Sequence
  chemically synthesized
cactatgttccttgattctcca

SEQ ID NO: 31761 - DNA, 22 bp, Artificial Sequence
  chemically synthesized
actatgttccttgattctccac

SEQ ID NO: 31762 - DNA, 22 bp, Artificial Sequence
  chemically synthesized
tgttccttgattctccacatat

SEQ ID NO: 31763 - DNA, 22 bp, Artificial Sequence
  chemically synthesized
cttgattctccacatatagtca

SEQ ID NO: 31764 - DNA, 22 bp, Artificial Sequence
  chemically synthesized
gattctccacatatagtcaaaa

SEQ ID NO: 31765 - DNA, 22 bp, Artificial Sequence
  chemically synthesized
attctccacatatagtcaaaag

SEQ ID NO: 31766 - DNA, 22 bp, Artificial Sequence
  chemically synthesized
tccacatatagtcaaaagtatt

SEQ ID NO: 31767 - DNA, 22 bp, Artificial Sequence
  chemically synthesized
cacatatagtcaaaagtattat

SEQ ID NO: 31768 - DNA, 22 bp, Artificial Sequence
  chemically synthesized
tgtatacagtagctaaattcct

SEQ ID NO: 31769 - DNA, 22 bp, Artificial Sequence
  chemically synthesized
aattccttgcctctcacaagcg

SEQ ID NO: 31770 - DNA, 22 bp, Artificial Sequence
  chemically synthesized
cttgcctctcacaagcgttgaa

SEQ ID NO: 31771 - DNA, 22 bp, Artificial Sequence
  chemically synthesized
gcctctcacaagcgttgaatca

SEQ ID NO: 31772 - DNA, 22 bp, Artificial Sequence
  chemically synthesized
cctctcacaagcgttgaatcaa

SEQ ID NO: 31773 - DNA, 22 bp, Artificial Sequence
  chemically synthesized
tcacaagcgttgaatcaagagt

SEQ ID NO: 31774 - DNA, 22 bp, Artificial Sequence
  chemically synthesized
acaagcgttgaatcaagagtgt

SEQ ID NO: 31775 - DNA, 22 bp, Artificial Sequence
  chemically synthesized
aatcaagagtgtcaaatgcatt

SEQ ID NO: 31776 - DNA, 22 bp, Artificial Sequence
  chemically synthesized
attttgcataactctctaaaca

SEQ ID NO: 31777 - DNA, 22 bp, Artificial Sequence
  chemically synthesized
ttttgcataactctctaaacaa

SEQ ID NO: 31778 - DNA, 22 bp, Artificial Sequence
  chemically synthesized
tgcataactctctaaacaattg

SEQ ID NO: 31779 - DNA, 22 bp, Artificial Sequence
  chemically synthesized
gcataactctctaaacaattga

SEQ ID NO: 31780 - DNA, 22 bp, Artificial Sequence
  chemically synthesized
cataactctctaaacaattgat

SEQ ID NO: 31781 - DNA, 22 bp, Artificial Sequence
  chemically synthesized
tctaaacaattgatgccaagga

SEQ ID NO: 31782 - DNA, 22 bp, Artificial Sequence
  chemically synthesized
taaacaattgatgccaaggatt

SEQ ID NO: 31783 - DNA, 22 bp, Artificial Sequence
  chemically synthesized
aacaattgatgccaaggattat

SEQ ID NO: 31784 - DNA, 22 bp, Artificial Sequence
  chemically synthesized
atgccaaggattatcagtgttc

SEQ ID NO: 31785 - DNA, 22 bp, Artificial Sequence
  chemically synthesized
tcagtgttctccataccattag

SEQ ID NO: 31786 - DNA, 22 bp, Artificial Sequence
  chemically synthesized
tccataccattagaagaagagt

SEQ ID NO: 31787 - DNA, 22 bp, Artificial Sequence
  chemically synthesized
cataccattagaagaagagtcc

SEQ ID NO: 31788 - DNA, 22 bp, Artificial Sequence
  chemically synthesized
gaagaagagtccttagcatatt

SEQ ID NO: 31789 - DNA, 22 bp, Artificial Sequence
  chemically synthesized
agcatatttgggtctaatcata

SEQ ID NO: 31790 - DNA, 22 bp, Artificial Sequence
  chemically synthesized
gcatatttgggtctaatcatat

SEQ ID NO: 31791 - DNA, 22 bp, Artificial Sequence
  chemically synthesized
gggtctaatcatattaagcagc

SEQ ID NO: 31792 - DNA, 22 bp, Artificial Sequence
  chemically synthesized
ggtctaatcatattaagcagcc

SEQ ID NO: 31793 - DNA, 22 bp, Artificial Sequence
  chemically synthesized
atcatattaagcagccaactcc

SEQ ID NO: 31794 - DNA, 22 bp, Artificial Sequence
  chemically synthesized
agcagccaactccagaaacccc

SEQ ID NO: 31795 - DNA, 22 bp, Artificial Sequence
  chemically synthesized
cagaaaccccaaaaccaatgaa

SEQ ID NO: 31796 - DNA, 22 bp, Artificial Sequence
  chemically synthesized
catccttaatattctgttcctc

SEQ ID NO: 31797 - DNA, 22 bp, Artificial Sequence
  chemically synthesized
aatattctgttcctctagaacc

SEQ ID NO: 31798 - DNA, 22 bp, Artificial Sequence
  chemically synthesized
atattctgttcctctagaacca

SEQ ID NO: 31799 - DNA, 22 bp, Artificial Sequence
  chemically synthesized
tgttcctctagaaccactcctg

SEQ ID NO: 31800 - DNA, 22 bp, Artificial Sequence
  chemically synthesized
ttcctctagaaccactcctggt

SEQ ID NO: 31801 - DNA, 22 bp, Artificial Sequence
  chemically synthesized
ctctagaaccactcctggtacc

SEQ ID NO: 31802 - DNA, 22 bp, Artificial Sequence
  chemically synthesized
tagaaccactcctggtaccaaa

SEQ ID NO: 31803 - DNA, 22 bp, Artificial Sequence
  chemically synthesized
gaaccactcctggtaccaaaat

SEQ ID NO: 31804 - DNA, 22 bp, Artificial Sequence
  chemically synthesized
ctggtaccaaaatctgtattag

SEQ ID NO: 31805 - DNA, 22 bp, Artificial Sequence
  chemically synthesized
gtaccaaaatctgtattagggt

SEQ ID NO: 31806 - DNA, 22 bp, Artificial Sequence
  chemically synthesized
tattagggttctacagagaaac

SEQ ID NO: 31807 - DNA, 22 bp, Artificial Sequence
  chemically synthesized
gggttctacagagaaacagaat

SEQ ID NO: 31808 - DNA, 22 bp, Artificial Sequence
  chemically synthesized
tacagagaaacagaattaatag

SEQ ID NO: 31809 - DNA, 22 bp, Artificial Sequence
  chemically synthesized
cagagaaacagaattaatagga

SEQ ID NO: 31810 - DNA, 22 bp, Artificial Sequence
  chemically synthesized
ataggagatatatatctatatc

SEQ ID NO: 31811 - DNA, 22 bp, Artificial Sequence
  chemically synthesized
tatctatatctatatctatatc

SEQ ID NO: 31812 - DNA, 22 bp, Artificial Sequence
  chemically synthesized
tatctatatctatatctatatc

SEQ ID NO: 31813 - DNA, 22 bp, Artificial Sequence
  chemically synthesized
tatctatatctatatctatatc

SEQ ID NO: 31814 - DNA, 22 bp, Artificial Sequence
  chemically synthesized
tatctatatctatatctatctc

SEQ ID NO: 31815 - DNA, 22 bp, Artificial Sequence
  chemically synthesized
tatctatatctatctctatatc

SEQ ID NO: 31816 - DNA, 22 bp, Artificial Sequence
  chemically synthesized
tatctatctctatatctatctc

SEQ ID NO: 31817 - DNA, 22 bp, Artificial Sequence
  chemically synthesized
tctctatatctatctctatatc

SEQ ID NO: 31818 - DNA, 22 bp, Artificial Sequence
  chemically synthesized
tatatctatctctatatctata

SEQ ID NO: 31819 - DNA, 22 bp, Artificial Sequence
  chemically synthesized
tatctatctctatatctatatc

SEQ ID NO: 31820 - DNA, 22 bp, Artificial Sequence
  chemically synthesized
tctctatatctatatctatatg

SEQ ID NO: 31821 - DNA, 22 bp, Artificial Sequence
  chemically synthesized
tatatctatatctatatgagag

SEQ ID NO: 31822 - DNA, 22 bp, Artificial Sequence
  chemically synthesized
tatctatatctatatgagagtt

SEQ ID NO: 31823 - DNA, 22 bp, Artificial Sequence
  chemically synthesized
tatctatatgagagtttattat

SEQ ID NO: 31824 - DNA, 22 bp, Artificial Sequence
  chemically synthesized
tatgagagtttattatgtagta

SEQ ID NO: 31825 - DNA, 22 bp, Artificial Sequence
  chemically synthesized
attatgtagtattgactcacat

SEQ ID NO: 31826 - DNA, 22 bp, Artificial Sequence
  chemically synthesized
ttatgtagtattgactcacatg

SEQ ID NO: 31827 - DNA, 22 bp, Artificial Sequence
  chemically synthesized
tgtagtattgactcacatgttc

SEQ ID NO: 31828 - DNA, 22 bp, Artificial Sequence
  chemically synthesized
actcacatgttcacaaggtccc

SEQ ID NO: 31829 - DNA, 22 bp, Artificial Sequence
  chemically synthesized
acatgttcacaaggtcccaaaa

SEQ ID NO: 31830 - DNA, 22 bp, Artificial Sequence
  chemically synthesized
acaaggtcccaaaacaggccat

SEQ ID NO: 31831 - DNA, 22 bp, Artificial Sequence
  chemically synthesized
ccagctgaggaacaaggaagct

SEQ ID NO: 31832 - DNA, 22 bp, Artificial Sequence
  chemically synthesized
aggaacaaggaagctagtcgga

SEQ ID NO: 31833 - DNA, 22 bp, Artificial Sequence
  chemically synthesized
gtcggagtcccaaagctgaaga

SEQ ID NO: 31834 - DNA, 22 bp, Artificial Sequence
  chemically synthesized
aagaacctggagttcaatgttc

SEQ ID NO: 31835 - DNA, 22 bp, Artificial Sequence
  chemically synthesized
gagttcaatgttccagggcagg

SEQ ID NO: 31836 - DNA, 22 bp, Artificial Sequence
  chemically synthesized
aatgttccagggcaggaagaat

SEQ ID NO: 31837 - DNA, 22 bp, Artificial Sequence
  chemically synthesized
cagggcaggaagaatccagcat

SEQ ID NO: 31838 - DNA, 22 bp, Artificial Sequence
  chemically synthesized
ggatgccaagccaatctagcct

SEQ ID NO: 31839 - DNA, 22 bp, Artificial Sequence
  chemically synthesized
gccttttcacatttttctgcct

SEQ ID NO: 31840 - DNA, 22 bp, Artificial Sequence
  chemically synthesized
ttcacatttttctgcctgcttt

SEQ ID NO: 31841 - DNA, 22 bp, Artificial Sequence
  chemically synthesized
tcacatttttctgcctgcttta

SEQ ID NO: 31842 - DNA, 22 bp, Artificial Sequence
  chemically synthesized
cacatttttctgcctgctttat

SEQ ID NO: 31843 - DNA, 22 bp, Artificial Sequence
  chemically synthesized
acatttttctgcctgctttata

SEQ ID NO: 31844 - DNA, 22 bp, Artificial Sequence
  chemically synthesized
ttctgcctgctttatatcctgg

SEQ ID NO: 31845 - DNA, 22 bp, Artificial Sequence
  chemically synthesized
tctgcctgctttatatcctggc

SEQ ID NO: 31846 - DNA, 22 bp, Artificial Sequence
  chemically synthesized
ctgcctgctttatatcctggct

SEQ ID NO: 31847 - DNA, 22 bp, Artificial Sequence
  chemically synthesized
tgcctgctttatatcctggctg

SEQ ID NO: 31848 - DNA, 22 bp, Artificial Sequence
  chemically synthesized
cctgctttatatcctggctgtg

SEQ ID NO: 31849 - DNA, 22 bp, Artificial Sequence
  chemically synthesized
ctttatatcctggctgtgctgg

SEQ ID NO: 31850 - DNA, 22 bp, Artificial Sequence
  chemically synthesized
tatatcctggctgtgctggcaa

SEQ ID NO: 31851 - DNA, 22 bp, Artificial Sequence
  chemically synthesized
atatcctggctgtgctggcaac

SEQ ID NO: 31852 - DNA, 22 bp, Artificial Sequence
  chemically synthesized
tatcctggctgtgctggcaact

SEQ ID NO: 31853 - DNA, 22 bp, Artificial Sequence
  chemically synthesized
gctgtgctggcaactgattaga

SEQ ID NO: 31854 - DNA, 22 bp, Artificial Sequence
  chemically synthesized
tgctggcaactgattagatggt

SEQ ID NO: 31855 - DNA, 22 bp, Artificial Sequence
  chemically synthesized
gcaactgattagatggtgccca

SEQ ID NO: 31856 - DNA, 22 bp, Artificial Sequence
  chemically synthesized
attagatggtgcccacccagat

SEQ ID NO: 31857 - DNA, 22 bp, Artificial Sequence
  chemically synthesized
gatggtgcccacccagattaag

SEQ ID NO: 31858 - DNA, 22 bp, Artificial Sequence
  chemically synthesized
agggtgggtctgccttccccag

SEQ ID NO: 31859 - DNA, 22 bp, Artificial Sequence
  chemically synthesized
ccttccccagcccactgactga

SEQ ID NO: 31860 - DNA, 22 bp, Artificial Sequence
  chemically synthesized
ccccagcccactgactgaaata

SEQ ID NO: 31861 - DNA, 22 bp, Artificial Sequence
  chemically synthesized
cccagcccactgactgaaatat

SEQ ID NO: 31862 - DNA, 22 bp, Artificial Sequence
  chemically synthesized
actgaaatattaatctcctttg

SEQ ID NO: 31863 - DNA, 22 bp, Artificial Sequence
  chemically synthesized
aaatattaatctcctttggtaa

SEQ ID NO: 31864 - DNA, 22 bp, Artificial Sequence
  chemically synthesized
atctcctttggtaacaccctca

SEQ ID NO: 31865 - DNA, 22 bp, Artificial Sequence
  chemically synthesized
ctttggtaacaccctcacagac

SEQ ID NO: 31866 - DNA, 22 bp, Artificial Sequence
  chemically synthesized
tggtaacaccctcacagacaca

SEQ ID NO: 31867 - DNA, 22 bp, Artificial Sequence
  chemically synthesized
ggtaacaccctcacagacacac

SEQ ID NO: 31868 - DNA, 22 bp, Artificial Sequence
  chemically synthesized
gtaacaccctcacagacacacc

SEQ ID NO: 31869 - DNA, 22 bp, Artificial Sequence
  chemically synthesized
acagacacacccaagatcatta

SEQ ID NO: 31870 - DNA, 22 bp, Artificial Sequence
  chemically synthesized
ctttgcatccttcagtccaatc

SEQ ID NO: 31871 - DNA, 22 bp, Artificial Sequence
  chemically synthesized
tgcatccttcagtccaatcaag

SEQ ID NO: 31872 - DNA, 22 bp, Artificial Sequence
  chemically synthesized
gcatccttcagtccaatcaagt

SEQ ID NO: 31873 - DNA, 22 bp, Artificial Sequence
  chemically synthesized
catccttcagtccaatcaagtt

SEQ ID NO: 31874 - DNA, 22 bp, Artificial Sequence
  chemically synthesized
cagtccaatcaagttgacactc

SEQ ID NO: 31875 - DNA, 22 bp, Artificial Sequence
  chemically synthesized
agtccaatcaagttgacactca

SEQ ID NO: 31876 - DNA, 22 bp, Artificial Sequence
  chemically synthesized
acactcagtattaaccatcaca

SEQ ID NO: 31877 - DNA, 22 bp, Artificial Sequence
  chemically synthesized
agtattaaccatcacagtcact

SEQ ID NO: 31878 - DNA, 22 bp, Artificial Sequence
  chemically synthesized
accatcacagtcactttctaat

SEQ ID NO: 31879 - DNA, 22 bp, Artificial Sequence
  chemically synthesized
tctaatgaggttggtttttttg

SEQ ID NO: 31880 - DNA, 22 bp, Artificial Sequence
  chemically synthesized
ctaatgaggttggtttttttgt

SEQ ID NO: 31881 - DNA, 22 bp, Artificial Sequence
  chemically synthesized
taatgaggttggtttttttgtt

SEQ ID NO: 31882 - DNA, 22 bp, Artificial Sequence
  chemically synthesized
atgaggttggtttttttgttgt

SEQ ID NO: 31883 - DNA, 22 bp, Artificial Sequence
  chemically synthesized
gtttttttgttgttgagttcct

SEQ ID NO: 31884 - DNA, 22 bp, Artificial Sequence
  chemically synthesized
ttttgttgttgagttccttgta

SEQ ID NO: 31885 - DNA, 22 bp, Artificial Sequence
  chemically synthesized
tttgttgttgagttccttgtag

SEQ ID NO: 31886 - DNA, 22 bp, Artificial Sequence
  chemically synthesized
ttgttgttgagttccttgtaga

SEQ ID NO: 31887 - DNA, 22 bp, Artificial Sequence
  chemically synthesized
tgttgttgagttccttgtagat

SEQ ID NO: 31888 - DNA, 22 bp, Artificial Sequence
  chemically synthesized
gttgttgagttccttgtagatt

SEQ ID NO: 31889 - DNA, 22 bp, Artificial Sequence
  chemically synthesized
ttgttgagttccttgtagattc

SEQ ID NO: 31890 - DNA, 22 bp, Artificial Sequence
  chemically synthesized
ttgagttccttgtagattctgt

SEQ ID NO: 31891 - DNA, 22 bp, Artificial Sequence
  chemically synthesized
agttccttgtagattctgtata

SEQ ID NO: 31892 - DNA, 22 bp, Artificial Sequence
  chemically synthesized
cttgtagattctgtatattagc

SEQ ID NO: 31893 - DNA, 22 bp, Artificial Sequence
  chemically synthesized
gtagattctgtatattagcctt

SEQ ID NO: 31894 - DNA, 22 bp, Artificial Sequence
  chemically synthesized
tagattctgtatattagccttt

SEQ ID NO: 31895 - DNA, 22 bp, Artificial Sequence
  chemically synthesized
tgtatattagccttttgttgca

SEQ ID NO: 31896 - DNA, 22 bp, Artificial Sequence
  chemically synthesized
tatattagccttttgttgcatt

SEQ ID NO: 31897 - DNA, 22 bp, Artificial Sequence
  chemically synthesized
gccttttgttgcattcatagtt

SEQ ID NO: 31898 - DNA, 22 bp, Artificial Sequence
  chemically synthesized
ttgttgcattcatagtttgcaa

SEQ ID NO: 31899 - DNA, 22 bp, Artificial Sequence
  chemically synthesized
tgttgcattcatagtttgcaat

SEQ ID NO: 31900 - DNA, 22 bp, Artificial Sequence
  chemically synthesized
gttgcattcatagtttgcaatt

SEQ ID NO: 31901 - DNA, 22 bp, Artificial Sequence
  chemically synthesized
ttgcattcatagtttgcaattt

SEQ ID NO: 31902 - DNA, 22 bp, Artificial Sequence
  chemically synthesized
cattcatagtttgcaatttttt

SEQ ID NO: 31903 - DNA, 22 bp, Artificial Sequence
  chemically synthesized
atagtttgcaatttttttttct

SEQ ID NO: 31904 - DNA, 22 bp, Artificial Sequence
  chemically synthesized
gcaatttttttttctcattctg

SEQ ID NO: 31905 - DNA, 22 bp, Artificial Sequence
  chemically synthesized
caatttttttttctcattctgt

SEQ ID NO: 31906 - DNA, 22 bp, Artificial Sequence
  chemically synthesized
ttttttctcattctgtaggtta

SEQ ID NO: 31907 - DNA, 22 bp, Artificial Sequence
  chemically synthesized
tttttctcattctgtaggttat

SEQ ID NO: 31908 - DNA, 22 bp, Artificial Sequence
  chemically synthesized
ttttctcattctgtaggttatc

SEQ ID NO: 31909 - DNA, 22 bp, Artificial Sequence
  chemically synthesized
tttctcattctgtaggttatcc

SEQ ID NO: 31910 - DNA, 22 bp, Artificial Sequence
  chemically synthesized
ttctcattctgtaggttatccg

SEQ ID NO: 31911 - DNA, 22 bp, Artificial Sequence
  chemically synthesized
tctcattctgtaggttatccgt

SEQ ID NO: 31912 - DNA, 22 bp, Artificial Sequence
  chemically synthesized
ctcattctgtaggttatccgtt

SEQ ID NO: 31913 - DNA, 22 bp, Artificial Sequence
  chemically synthesized
tcattctgtaggttatccgttt

SEQ ID NO: 31914 - DNA, 22 bp, Artificial Sequence
  chemically synthesized
attctgtaggttatccgtttac

SEQ ID NO: 31915 - DNA, 22 bp, Artificial Sequence
  chemically synthesized
tgtaggttatccgtttactctg

SEQ ID NO: 31916 - DNA, 22 bp, Artificial Sequence
  chemically synthesized
taggttatccgtttactctgtt

SEQ ID NO: 31917 - DNA, 22 bp, Artificial Sequence
  chemically synthesized
tccgtttactctgttgattcgg

SEQ ID NO: 31918 - DNA, 22 bp, Artificial Sequence
  chemically synthesized
actctgttgattcggtcttttg

SEQ ID NO: 31919 - DNA, 22 bp, Artificial Sequence
  chemically synthesized
ctctgttgattcggtcttttgc

SEQ ID NO: 31920 - DNA, 22 bp, Artificial Sequence
  chemically synthesized
tgttgattcggtcttttgcggt

SEQ ID NO: 31921 - DNA, 22 bp, Artificial Sequence
  chemically synthesized
ttgattcggtcttttgcggtgc

SEQ ID NO: 31922 - DNA, 22 bp, Artificial Sequence
  chemically synthesized
attcggtcttttgcggtgcaga

SEQ ID NO: 31923 - DNA, 22 bp, Artificial Sequence
  chemically synthesized
ggtcttttgcggtgcagaagca

SEQ ID NO: 31924 - DNA, 22 bp, Artificial Sequence
  chemically synthesized
ttgcggtgcagaagcattttag

SEQ ID NO: 31925 - DNA, 22 bp, Artificial Sequence
  chemically synthesized
tgcggtgcagaagcattttagt

SEQ ID NO: 31926 - DNA, 22 bp, Artificial Sequence
  chemically synthesized
gcggtgcagaagcattttagtt

SEQ ID NO: 31927 - DNA, 22 bp, Artificial Sequence
  chemically synthesized
cggtgcagaagcattttagttt

SEQ ID NO: 31928 - DNA, 22 bp, Artificial Sequence
  chemically synthesized
tagtttaattaagtcccatttg

SEQ ID NO: 31929 - DNA, 22 bp, Artificial Sequence
  chemically synthesized
agtttaattaagtcccatttgt

SEQ ID NO: 31930 - DNA, 22 bp, Artificial Sequence
  chemically synthesized
gtttaattaagtcccatttgtc

SEQ ID NO: 31931 - DNA, 22 bp, Artificial Sequence
  chemically synthesized
aattaagtcccatttgtctgtt

SEQ ID NO: 31932 - DNA, 22 bp, Artificial Sequence
  chemically synthesized
attaagtcccatttgtctgttt

SEQ ID NO: 31933 - DNA, 22 bp, Artificial Sequence
  chemically synthesized
agtcccatttgtctgtttttgt

SEQ ID NO: 31934 - DNA, 22 bp, Artificial Sequence
  chemically synthesized
gtctgtttttgtttttgttgtg

SEQ ID NO: 31935 - DNA, 22 bp, Artificial Sequence
  chemically synthesized
tctgtttttgtttttgttgtgt

SEQ ID NO: 31936 - DNA, 22 bp, Artificial Sequence
  chemically synthesized
tttttgtttttgttgtgtttag

SEQ ID NO: 31937 - DNA, 22 bp, Artificial Sequence
  chemically synthesized
ttgtttttgttgtgtttagttt

SEQ ID NO: 31938 - DNA, 22 bp, Artificial Sequence
  chemically synthesized
tgtttttgttgtgtttagtttt

SEQ ID NO: 31939 - DNA, 22 bp, Artificial Sequence
  chemically synthesized
gtttttgttgtgtttagttttg

SEQ ID NO: 31940 - DNA, 22 bp, Artificial Sequence
  chemically synthesized
tttttgttgtgtttagttttga

SEQ ID NO: 31941 - DNA, 22 bp, Artificial Sequence
  chemically synthesized
ttgttgtgtttagttttgagga

SEQ ID NO: 31942 - DNA, 22 bp, Artificial Sequence
  chemically synthesized
tgttgtgtttagttttgaggac

SEQ ID NO: 31943 - DNA, 22 bp, Artificial Sequence
  chemically synthesized
gttgtgtttagttttgaggact

SEQ ID NO: 31944 - DNA, 22 bp, Artificial Sequence
  chemically synthesized
ttgtgtttagttttgaggactt

SEQ ID NO: 31945 - DNA, 22 bp, Artificial Sequence
  chemically synthesized
tgtttagttttgaggacttggt

SEQ ID NO: 31946 - DNA, 22 bp, Artificial Sequence
  chemically synthesized
agttttgaggacttggtcataa

SEQ ID NO: 31947 - DNA, 22 bp, Artificial Sequence
  chemically synthesized
gttttgaggacttggtcataaa

SEQ ID NO: 31948 - DNA, 22 bp, Artificial Sequence
  chemically synthesized
tgaggacttggtcataaattct

SEQ ID NO: 31949 - DNA, 22 bp, Artificial Sequence
  chemically synthesized
gaggacttggtcataaattctt

SEQ ID NO: 31950 - DNA, 22 bp, Artificial Sequence
  chemically synthesized
aggacttggtcataaattcttt

SEQ ID NO: 31951 - DNA, 22 bp, Artificial Sequence
  chemically synthesized
ggtcataaattctttgcctagg

SEQ ID NO: 31952 - DNA, 22 bp, Artificial Sequence
  chemically synthesized
gtcataaattctttgcctaggc

SEQ ID NO: 31953 - DNA, 22 bp, Artificial Sequence
  chemically synthesized
tttgcctaggccacatctaatt

SEQ ID NO: 31954 - DNA, 22 bp, Artificial Sequence
  chemically synthesized
tgcctaggccacatctaatttt

SEQ ID NO: 31955 - DNA, 22 bp, Artificial Sequence
  chemically synthesized
gcctaggccacatctaattttt

SEQ ID NO: 31956 - DNA, 22 bp, Artificial Sequence
  chemically synthesized
cctaggccacatctaattttta

SEQ ID NO: 31957 - DNA, 22 bp, Artificial Sequence
  chemically synthesized
ggccacatctaatttttaatcc

SEQ ID NO: 31958 - DNA, 22 bp, Artificial Sequence
  chemically synthesized
atttttaatcctcttttagagc

SEQ ID NO: 31959 - DNA, 22 bp, Artificial Sequence
  chemically synthesized
ttaatcctcttttagagcctgt

SEQ ID NO: 31960 - DNA, 22 bp, Artificial Sequence
  chemically synthesized
taatcctcttttagagcctgtc

SEQ ID NO: 31961 - DNA, 22 bp, Artificial Sequence
  chemically synthesized
aatcctcttttagagcctgtct

SEQ ID NO: 31962 - DNA, 22 bp, Artificial Sequence
  chemically synthesized
atcctcttttagagcctgtctt

SEQ ID NO: 31963 - DNA, 22 bp, Artificial Sequence
  chemically synthesized
ttttagagcctgtctttccctc

SEQ ID NO: 31964 - DNA, 22 bp, Artificial Sequence
  chemically synthesized
ttagagcctgtctttccctcca

SEQ ID NO: 31965 - DNA, 22 bp, Artificial Sequence
  chemically synthesized
tagagcctgtctttccctccaa

SEQ ID NO: 31966 - DNA, 22 bp, Artificial Sequence
  chemically synthesized
agagcctgtctttccctccaaa

SEQ ID NO: 31967 - DNA, 22 bp, Artificial Sequence
  chemically synthesized
gagcctgtctttccctccaaac

SEQ ID NO: 31968 - DNA, 22 bp, Artificial Sequence
  chemically synthesized
tctttccctccaaactaaatat

SEQ ID NO: 31969 - DNA, 22 bp, Artificial Sequence
  chemically synthesized
tccctccaaactaaatattatt

SEQ ID NO: 31970 - DNA, 22 bp, Artificial Sequence
  chemically synthesized
ccctccaaactaaatattattt

SEQ ID NO: 31971 - DNA, 22 bp, Artificial Sequence
  chemically synthesized
cctccaaactaaatattatttt

SEQ ID NO: 31972 - DNA, 22 bp, Artificial Sequence
  chemically synthesized
caaactaaatattattttaccc

SEQ ID NO: 31973 - DNA, 22 bp, Artificial Sequence
  chemically synthesized
aatattattttacccccatttg

SEQ ID NO: 31974 - DNA, 22 bp, Artificial Sequence
  chemically synthesized
ttttacccccatttgacacatg

SEQ ID NO: 31975 - DNA, 22 bp, Artificial Sequence
  chemically synthesized
tacccccatttgacacatgagc

SEQ ID NO: 31976 - DNA, 22 bp, Artificial Sequence
  chemically synthesized
acccccatttgacacatgagct

SEQ ID NO: 31977 - DNA, 22 bp, Artificial Sequence
  chemically synthesized
cccccatttgacacatgagcta

SEQ ID NO: 31978 - DNA, 22 bp, Artificial Sequence
  chemically synthesized
gacacatgagctaattgagcct

SEQ ID NO: 31979 - DNA, 22 bp, Artificial Sequence
  chemically synthesized
acacatgagctaattgagcctt

SEQ ID NO: 31980 - DNA, 22 bp, Artificial Sequence
  chemically synthesized
attgagccttctgtctgttaag

SEQ ID NO: 31981 - DNA, 22 bp, Artificial Sequence
  chemically synthesized
agccttctgtctgttaagtaag

SEQ ID NO: 31982 - DNA, 22 bp, Artificial Sequence
  chemically synthesized
ctgtctgttaagtaagttgact

SEQ ID NO: 31983 - DNA, 22 bp, Artificial Sequence
  chemically synthesized
tgtctgttaagtaagttgacta

SEQ ID NO: 31984 - DNA, 22 bp, Artificial Sequence
  chemically synthesized
tctgttaagtaagttgactagt

SEQ ID NO: 31985 - DNA, 22 bp, Artificial Sequence
  chemically synthesized
ttaagtaagttgactagttcag

SEQ ID NO: 31986 - DNA, 22 bp, Artificial Sequence
  chemically synthesized
agtaagttgactagttcagtgt

SEQ ID NO: 31987 - DNA, 22 bp, Artificial Sequence
  chemically synthesized
actagttcagtgtaagttgttt

SEQ ID NO: 31988 - DNA, 22 bp, Artificial Sequence
  chemically synthesized
gttcagtgtaagttgtttctaa

SEQ ID NO: 31989 - DNA, 22 bp, Artificial Sequence
  chemically synthesized
agtgtaagttgtttctaatttt

SEQ ID NO: 31990 - DNA, 22 bp, Artificial Sequence
  chemically synthesized
tttctaattttttgccatcata

SEQ ID NO: 31991 - DNA, 22 bp, Artificial Sequence
  chemically synthesized
ctaattttttgccatcataatg

SEQ ID NO: 31992 - DNA, 22 bp, Artificial Sequence
  chemically synthesized
taattttttgccatcataatgc

SEQ ID NO: 31993 - DNA, 22 bp, Artificial Sequence
  chemically synthesized
attttttgccatcataatgctt

SEQ ID NO: 31994 - DNA, 22 bp, Artificial Sequence
  chemically synthesized
tttgccatcataatgctttagt

SEQ ID NO: 31995 - DNA, 22 bp, Artificial Sequence
  chemically synthesized
ttgccatcataatgctttagta

SEQ ID NO: 31996 - DNA, 22 bp, Artificial Sequence
  chemically synthesized
tgccatcataatgctttagtaa

SEQ ID NO: 31997 - DNA, 22 bp, Artificial Sequence
  chemically synthesized
gccatcataatgctttagtaaa

SEQ ID NO: 31998 - DNA, 22 bp, Artificial Sequence
  chemically synthesized
ccatcataatgctttagtaaac

SEQ ID NO: 31999 - DNA, 22 bp, Artificial Sequence
  chemically synthesized
tagtaaacatccttttcatact

SEQ ID NO: 32000 - DNA, 22 bp, Artificial Sequence
  chemically synthesized
agtaaacatccttttcatactc

SEQ ID NO: 32001 - DNA, 22 bp, Artificial Sequence
  chemically synthesized
gtaaacatccttttcatactct

SEQ ID NO: 32002 - DNA, 22 bp, Artificial Sequence
  chemically synthesized
ttcatactctccttaattttcc

SEQ ID NO: 32003 - DNA, 22 bp, Artificial Sequence
  chemically synthesized
tcatactctccttaattttccc

SEQ ID NO: 32004 - DNA, 22 bp, Artificial Sequence
  chemically synthesized
catactctccttaattttcccc

SEQ ID NO: 32005 - DNA, 22 bp, Artificial Sequence
  chemically synthesized
atactctccttaattttccccc

SEQ ID NO: 32006 - DNA, 22 bp, Artificial Sequence
  chemically synthesized
tccttaattttcccccaggatg

SEQ ID NO: 32007 - DNA, 22 bp, Artificial Sequence
  chemically synthesized
cttaattttcccccaggatggt

SEQ ID NO: 32008 - DNA, 22 bp, Artificial Sequence
  chemically synthesized
aattttcccccaggatggtttt

SEQ ID NO: 32009 - DNA, 22 bp, Artificial Sequence
  chemically synthesized
attttcccccaggatggttttc

SEQ ID NO: 32010 - DNA, 22 bp, Artificial Sequence
  chemically synthesized
tcccccaggatggttttctaga

SEQ ID NO: 32011 - DNA, 22 bp, Artificial Sequence
  chemically synthesized
cccccaggatggttttctagat

SEQ ID NO: 32012 - DNA, 22 bp, Artificial Sequence
  chemically synthesized
ccccaggatggttttctagatg

SEQ ID NO: 32013 - DNA, 22 bp, Artificial Sequence
  chemically synthesized
tctagatgtggacttgctggat

SEQ ID NO: 32014 - DNA, 22 bp, Artificial Sequence
  chemically synthesized
ctagatgtggacttgctggatc

SEQ ID NO: 32015 - DNA, 22 bp, Artificial Sequence
  chemically synthesized
tagatgtggacttgctggatcc

SEQ ID NO: 32016 - DNA, 22 bp, Artificial Sequence
  chemically synthesized
gatgtggacttgctggatccaa

SEQ ID NO: 32017 - DNA, 22 bp, Artificial Sequence
  chemically synthesized
gctggatccaaagtgtgcatat

SEQ ID NO: 32018 - DNA, 22 bp, Artificial Sequence
  chemically synthesized
ctggatccaaagtgtgcatatt

SEQ ID NO: 32019 - DNA, 22 bp, Artificial Sequence
  chemically synthesized
gatccaaagtgtgcatattttc

SEQ ID NO: 32020 - DNA, 22 bp, Artificial Sequence
  chemically synthesized
tccaaatgtatccatatattgt

SEQ ID NO: 32021 - DNA, 22 bp, Artificial Sequence
  chemically synthesized
ccaaatgtatccatatattgtg

SEQ ID NO: 32022 - DNA, 22 bp, Artificial Sequence
  chemically synthesized
caaatgtatccatatattgtgg

SEQ ID NO: 32023 - DNA, 22 bp, Artificial Sequence
  chemically synthesized
tggctttgtgttttaatagagg

SEQ ID NO: 32024 - DNA, 22 bp, Artificial Sequence
  chemically synthesized
tgtgttttaatagaggtagcag

SEQ ID NO: 32025 - DNA, 22 bp, Artificial Sequence
  chemically synthesized
gtgttttaatagaggtagcagc

SEQ ID NO: 32026 - DNA, 22 bp, Artificial Sequence
  chemically synthesized
tgttttaatagaggtagcagca

SEQ ID NO: 32027 - DNA, 22 bp, Artificial Sequence
  chemically synthesized
taatagaggtagcagcaatatt

SEQ ID NO: 32028 - DNA, 22 bp, Artificial Sequence
  chemically synthesized
aatagaggtagcagcaatatta

SEQ ID NO: 32029 - DNA, 22 bp, Artificial Sequence
  chemically synthesized
atagaggtagcagcaatattag

SEQ ID NO: 32030 - DNA, 22 bp, Artificial Sequence
  chemically synthesized
gaggagagaattaaggaacgat

SEQ ID NO: 32031 - DNA, 22 bp, Artificial Sequence
  chemically synthesized
aggaacgattctagtgtagcag

SEQ ID NO: 32032 - DNA, 22 bp, Artificial Sequence
  chemically synthesized
tagtgtagcaggacaagctgca

SEQ ID NO: 32033 - DNA, 22 bp, Artificial Sequence
  chemically synthesized
gtgtagcaggacaagctgcata

SEQ ID NO: 32034 - DNA, 22 bp, Artificial Sequence
  chemically synthesized
catacaaaacccctcagacacc

SEQ ID NO: 32035 - DNA, 22 bp, Artificial Sequence
  chemically synthesized
agacaccgagttaaagaaggaa

SEQ ID NO: 32036 - DNA, 22 bp, Artificial Sequence
  chemically synthesized
aagaaggaagggctttattcgg

SEQ ID NO: 32037 - DNA, 22 bp, Artificial Sequence
  chemically synthesized
tattcggctgggagcttgggca

SEQ ID NO: 32038 - DNA, 22 bp, Artificial Sequence
  chemically synthesized
attcggctgggagcttgggcaa

SEQ ID NO: 32039 - DNA, 22 bp, Artificial Sequence
  chemically synthesized
ttcggctgggagcttgggcaag

SEQ ID NO: 32040 - DNA, 22 bp, Artificial Sequence
  chemically synthesized
ggctgggagcttgggcaagact

SEQ ID NO: 32041 - DNA, 22 bp, Artificial Sequence
  chemically synthesized
ggagcttgggcaagactcacat

SEQ ID NO: 32042 - DNA, 22 bp, Artificial Sequence
  chemically synthesized
gggcaagactcacatctccaac

SEQ ID NO: 32043 - DNA, 22 bp, Artificial Sequence
  chemically synthesized
ggcaagactcacatctccaaca

SEQ ID NO: 32044 - DNA, 22 bp, Artificial Sequence
  chemically synthesized
acatctccaacaaccaagctct

SEQ ID NO: 32045 - DNA, 22 bp, Artificial Sequence
  chemically synthesized
caacaaccaagctctcagagtg

SEQ ID NO: 32046 - DNA, 22 bp, Artificial Sequence
  chemically synthesized
tcagagtgagcaattcctgtcc

SEQ ID NO: 32047 - DNA, 22 bp, Artificial Sequence
  chemically synthesized
agagtgagcaattcctgtccct

SEQ ID NO: 32048 - DNA, 22 bp, Artificial Sequence
  chemically synthesized
ctgtcccttttaagggcttaca

SEQ ID NO: 32049 - DNA, 22 bp, Artificial Sequence
  chemically synthesized
tcccttttaagggcttacaact

SEQ ID NO: 32050 - DNA, 22 bp, Artificial Sequence
  chemically synthesized
ttaagggcttacaactctaagg

SEQ ID NO: 32051 - DNA, 22 bp, Artificial Sequence
  chemically synthesized
taagggcttacaactctaaggg

SEQ ID NO: 32052 - DNA, 22 bp, Artificial Sequence
  chemically synthesized
aagggcttacaactctaagggg

SEQ ID NO: 32053 - DNA, 22 bp, Artificial Sequence
  chemically synthesized
agggcttacaactctaaggggg

SEQ ID NO: 32054 - DNA, 22 bp, Artificial Sequence
  chemically synthesized
acaactctaagggggtacatga

SEQ ID NO: 32055 - DNA, 22 bp, Artificial Sequence
  chemically synthesized
caactctaagggggtacatgac

SEQ ID NO: 32056 - DNA, 22 bp, Artificial Sequence
  chemically synthesized
taagggggtacatgactggggg

SEQ ID NO: 32057 - DNA, 22 bp, Artificial Sequence
  chemically synthesized
agggggtacatgactgggggct

SEQ ID NO: 32058 - DNA, 22 bp, Artificial Sequence
  chemically synthesized
ggggctgcatgcactggtcatc

SEQ ID NO: 32059 - DNA, 22 bp, Artificial Sequence
  chemically synthesized
catgcactggtcatcagaatgg

SEQ ID NO: 32060 - DNA, 22 bp, Artificial Sequence
  chemically synthesized
gtcatcagaatggaacagaaca

SEQ ID NO: 32061 - DNA, 22 bp, Artificial Sequence
  chemically synthesized
tcacactgcttttccatacagt

SEQ ID NO: 32062 - DNA, 22 bp, Artificial Sequence
  chemically synthesized
cacactgcttttccatacagtg

SEQ ID NO: 32063 - DNA, 22 bp, Artificial Sequence
  chemically synthesized
acactgcttttccatacagtgt

SEQ ID NO: 32064 - DNA, 22 bp, Artificial Sequence
  chemically synthesized
cttttccatacagtgtctggaa

SEQ ID NO: 32065 - DNA, 22 bp, Artificial Sequence
  chemically synthesized
ttccatacagtgtctggaatct

SEQ ID NO: 32066 - DNA, 22 bp, Artificial Sequence
  chemically synthesized
tccatacagtgtctggaatcta

SEQ ID NO: 32067 - DNA, 22 bp, Artificial Sequence
  chemically synthesized
ccatacagtgtctggaatctat

SEQ ID NO: 32068 - DNA, 22 bp, Artificial Sequence
  chemically synthesized
catacagtgtctggaatctata

SEQ ID NO: 32069 - DNA, 22 bp, Artificial Sequence
  chemically synthesized
gaatctatagataacataactg

SEQ ID NO: 32070 - DNA, 22 bp, Artificial Sequence
  chemically synthesized
tagataacataactggccaggt

SEQ ID NO: 32071 - DNA, 22 bp, Artificial Sequence
  chemically synthesized
gccaggtcaggggtctatcttt

SEQ ID NO: 32072 - DNA, 22 bp, Artificial Sequence
  chemically synthesized
tctttaaccaggcccaggatgt

SEQ ID NO: 32073 - DNA, 22 bp, Artificial Sequence
  chemically synthesized
taaccaggcccaggatgtggtc

SEQ ID NO: 32074 - DNA, 22 bp, Artificial Sequence
  chemically synthesized
aaccaggcccaggatgtggtct

SEQ ID NO: 32075 - DNA, 22 bp, Artificial Sequence
  chemically synthesized
accaggcccaggatgtggtctc

SEQ ID NO: 32076 - DNA, 22 bp, Artificial Sequence
  chemically synthesized
aggctgtttgcctgtggatttc

SEQ ID NO: 32077 - DNA, 22 bp, Artificial Sequence
  chemically synthesized
tttgcctgtggatttcatttct

SEQ ID NO: 32078 - DNA, 22 bp, Artificial Sequence
  chemically synthesized
gcctgtggatttcatttctgcc

SEQ ID NO: 32079 - DNA, 22 bp, Artificial Sequence
  chemically synthesized
cctgtggatttcatttctgcct

SEQ ID NO: 32080 - DNA, 22 bp, Artificial Sequence
  chemically synthesized
tggatttcatttctgcctttta

SEQ ID NO: 32081 - DNA, 22 bp, Artificial Sequence
  chemically synthesized
catttctgccttttagttttta

SEQ ID NO: 32082 - DNA, 22 bp, Artificial Sequence
  chemically synthesized
atttctgccttttagtttttac

SEQ ID NO: 32083 - DNA, 22 bp, Artificial Sequence
  chemically synthesized
ctgccttttagtttttacttct

SEQ ID NO: 32084 - DNA, 22 bp, Artificial Sequence
  chemically synthesized
tgccttttagtttttacttctt

SEQ ID NO: 32085 - DNA, 22 bp, Artificial Sequence
  chemically synthesized
ccttttagtttttacttcttct

SEQ ID NO: 32086 - DNA, 22 bp, Artificial Sequence
  chemically synthesized
ttagtttttacttcttctttct

SEQ ID NO: 32087 - DNA, 22 bp, Artificial Sequence
  chemically synthesized
tagtttttacttcttctttctt

SEQ ID NO: 32088 - DNA, 22 bp, Artificial Sequence
  chemically synthesized
agtttttacttcttctttcttt

SEQ ID NO: 32089 - DNA, 22 bp, Artificial Sequence
  chemically synthesized
gtttttacttcttctttctttg

SEQ ID NO: 32090 - DNA, 22 bp, Artificial Sequence
  chemically synthesized
ttacttcttctttctttggagg

SEQ ID NO: 32091 - DNA, 22 bp, Artificial Sequence
  chemically synthesized
tacttcttctttctttggaggc

SEQ ID NO: 32092 - DNA, 22 bp, Artificial Sequence
  chemically synthesized
acttcttctttctttggaggca

SEQ ID NO: 32093 - DNA, 22 bp, Artificial Sequence
  chemically synthesized
cttcttctttctttggaggcag

SEQ ID NO: 32094 - DNA, 22 bp, Artificial Sequence
  chemically synthesized
cttctttctttggaggcagaaa

SEQ ID NO: 32095 - DNA, 22 bp, Artificial Sequence
  chemically synthesized
ttctttctttggaggcagaaat

SEQ ID NO: 32096 - DNA, 22 bp, Artificial Sequence
  chemically synthesized
ctttctttggaggcagaaattg

SEQ ID NO: 32097 - DNA, 22 bp, Artificial Sequence
  chemically synthesized
tttctttggaggcagaaattgg

SEQ ID NO: 32098 - DNA, 22 bp, Artificial Sequence
  chemically synthesized
tctttggaggcagaaattgggc

SEQ ID NO: 32099 - DNA, 22 bp, Artificial Sequence
  chemically synthesized
ctttggaggcagaaattgggca

SEQ ID NO: 32100 - DNA, 22 bp, Artificial Sequence
  chemically synthesized
tttggaggcagaaattgggcat

SEQ ID NO: 32101 - DNA, 22 bp, Artificial Sequence
  chemically synthesized
tggaggcagaaattgggcataa

SEQ ID NO: 32102 - DNA, 22 bp, Artificial Sequence
  chemically synthesized
ggaggcagaaattgggcataaa

SEQ ID NO: 32103 - DNA, 22 bp, Artificial Sequence
  chemically synthesized
gaggcagaaattgggcataaaa

SEQ ID NO: 32104 - DNA, 22 bp, Artificial Sequence
  chemically synthesized
ggcataaaacaatatgaagggt

SEQ ID NO: 32105 - DNA, 22 bp, Artificial Sequence
  chemically synthesized
ctcccttactaggaagagagaa

SEQ ID NO: 32106 - DNA, 22 bp, Artificial Sequence
  chemically synthesized
ccttactaggaagagagaaata

SEQ ID NO: 32107 - DNA, 22 bp, Artificial Sequence
  chemically synthesized
actaggaagagagaaataccat

SEQ ID NO: 32108 - DNA, 22 bp, Artificial Sequence
  chemically synthesized
ctaggaagagagaaataccatg

SEQ ID NO: 32109 - DNA, 22 bp, Artificial Sequence
  chemically synthesized
ggaagagagaaataccatgtga

SEQ ID NO: 32110 - DNA, 22 bp, Artificial Sequence
  chemically synthesized
gtgttattggatttgacatcgg

SEQ ID NO: 32111 - DNA, 22 bp, Artificial Sequence
  chemically synthesized
tgttattggatttgacatcggg

SEQ ID NO: 32112 - DNA, 22 bp, Artificial Sequence
  chemically synthesized
ttggatttgacatcggggttgg

SEQ ID NO: 32113 - DNA, 22 bp, Artificial Sequence
  chemically synthesized
gatttgacatcggggttggacc

SEQ ID NO: 32114 - DNA, 22 bp, Artificial Sequence
  chemically synthesized
gacatcggggttggaccaagca

SEQ ID NO: 32115 - DNA, 22 bp, Artificial Sequence
  chemically synthesized
acatcggggttggaccaagcat

SEQ ID NO: 32116 - DNA, 22 bp, Artificial Sequence
  chemically synthesized
gaccaagcatcttctatgaaca

SEQ ID NO: 32117 - DNA, 22 bp, Artificial Sequence
  chemically synthesized
ctatgaacatctataagcacgt

SEQ ID NO: 32118 - DNA, 22 bp, Artificial Sequence
  chemically synthesized
tatgaacatctataagcacgtt

SEQ ID NO: 32119 - DNA, 22 bp, Artificial Sequence
  chemically synthesized
tgaacatctataagcacgttct

SEQ ID NO: 32120 - DNA, 22 bp, Artificial Sequence
  chemically synthesized
taagcacgttctccttatcaaa

SEQ ID NO: 32121 - DNA, 22 bp, Artificial Sequence
  chemically synthesized
tccttatcaaaaggtactttgc

SEQ ID NO: 32122 - DNA, 22 bp, Artificial Sequence
  chemically synthesized
cttatcaaaaggtactttgctt

SEQ ID NO: 32123 - DNA, 22 bp, Artificial Sequence
  chemically synthesized
atcaaaaggtactttgcttggt

SEQ ID NO: 32124 - DNA, 22 bp, Artificial Sequence
  chemically synthesized
tcaaaaggtactttgcttggtg

SEQ ID NO: 32125 - DNA, 22 bp, Artificial Sequence
  chemically synthesized
tgcttggtgctttaaaagataa

SEQ ID NO: 32126 - DNA, 22 bp, Artificial Sequence
  chemically synthesized
gcttggtgctttaaaagataaa

SEQ ID NO: 32127 - DNA, 22 bp, Artificial Sequence
  chemically synthesized
cttggtgctttaaaagataaat

SEQ ID NO: 32128 - DNA, 22 bp, Artificial Sequence
  chemically synthesized
ggtgctttaaaagataaatgac

SEQ ID NO: 32129 - DNA, 22 bp, Artificial Sequence
  chemically synthesized
gtgctttaaaagataaatgact

SEQ ID NO: 32130 - DNA, 22 bp, Artificial Sequence
  chemically synthesized
taaaagataaatgactatgtag

SEQ ID NO: 32131 - DNA, 22 bp, Artificial Sequence
  chemically synthesized
aaaagataaatgactatgtagc

SEQ ID NO: 32132 - DNA, 22 bp, Artificial Sequence
  chemically synthesized
aaagataaatgactatgtagct

SEQ ID NO: 32133 - DNA, 22 bp, Artificial Sequence
  chemically synthesized
tgtagcttaggagatttcttca

SEQ ID NO: 32134 - DNA, 22 bp, Artificial Sequence
  chemically synthesized
aggagatttcttcataattgaa

SEQ ID NO: 32135 - DNA, 22 bp, Artificial Sequence
  chemically synthesized
ggagatttcttcataattgaaa

SEQ ID NO: 32136 - DNA, 22 bp, Artificial Sequence
  chemically synthesized
cttcataattgaaaaccacagc

SEQ ID NO: 32137 - DNA, 22 bp, Artificial Sequence
  chemically synthesized
ttcataattgaaaaccacagca

SEQ ID NO: 32138 - DNA, 22 bp, Artificial Sequence
  chemically synthesized
cataattgaaaaccacagcagc

SEQ ID NO: 32139 - DNA, 22 bp, Artificial Sequence
  chemically synthesized
ataattgaaaaccacagcagct

SEQ ID NO: 32140 - DNA, 22 bp, Artificial Sequence
  chemically synthesized
aaaaccacagcagctgttattt

SEQ ID NO: 32141 - DNA, 22 bp, Artificial Sequence
  chemically synthesized
ttatttgaacatacctgagccc

SEQ ID NO: 32142 - DNA, 22 bp, Artificial Sequence
  chemically synthesized
tttgaacatacctgagcccctt

SEQ ID NO: 32143 - DNA, 22 bp, Artificial Sequence
  chemically synthesized
gaacatacctgagccccttctg

SEQ ID NO: 32144 - DNA, 22 bp, Artificial Sequence
  chemically synthesized
aacatacctgagccccttctgg

SEQ ID NO: 32145 - DNA, 22 bp, Artificial Sequence
  chemically synthesized
agccccttctggaccactgtag

SEQ ID NO: 32146 - DNA, 22 bp, Artificial Sequence
  chemically synthesized
ctggaccactgtaggagaagga

SEQ ID NO: 32147 - DNA, 22 bp, Artificial Sequence
  chemically synthesized
tggaccactgtaggagaaggag

SEQ ID NO: 32148 - DNA, 22 bp, Artificial Sequence
  chemically synthesized
gaccactgtaggagaaggagga

SEQ ID NO: 32149 - DNA, 22 bp, Artificial Sequence
  chemically synthesized
taggagaaggaggaagagaggt

SEQ ID NO: 32150 - DNA, 22 bp, Artificial Sequence
  chemically synthesized
ctgctgctgagggcatgtatga

SEQ ID NO: 32151 - DNA, 22 bp, Artificial Sequence
  chemically synthesized
tgctgctgagggcatgtatgat

SEQ ID NO: 32152 - DNA, 22 bp, Artificial Sequence
  chemically synthesized
ctgctgagggcatgtatgatga

SEQ ID NO: 32153 - DNA, 22 bp, Artificial Sequence
  chemically synthesized
ctgagggcatgtatgatgacaa

SEQ ID NO: 32154 - DNA, 22 bp, Artificial Sequence
  chemically synthesized
agggcatgtatgatgacaatgg

SEQ ID NO: 32155 - DNA, 22 bp, Artificial Sequence
  chemically synthesized
gtcctaactttgacactacaaa

SEQ ID NO: 32156 - DNA, 22 bp, Artificial Sequence
  chemically synthesized
tcctaactttgacactacaaag

SEQ ID NO: 32157 - DNA, 22 bp, Artificial Sequence
  chemically synthesized
actttgacactacaaagtgact

SEQ ID NO: 32158 - DNA, 22 bp, Artificial Sequence
  chemically synthesized
tgacactacaaagtgactggag

SEQ ID NO: 32159 - DNA, 22 bp, Artificial Sequence
  chemically synthesized
gacactacaaagtgactggagc

SEQ ID NO: 32160 - DNA, 22 bp, Artificial Sequence
  chemically synthesized
acactacaaagtgactggagct

SEQ ID NO: 32161 - DNA, 22 bp, Artificial Sequence
  chemically synthesized
caaagtgactggagctttaggc

SEQ ID NO: 32162 - DNA, 22 bp, Artificial Sequence
  chemically synthesized
gagctttaggcaagtagttact

SEQ ID NO: 32163 - DNA, 22 bp, Artificial Sequence
  chemically synthesized
taggcaagtagttactccaatt

SEQ ID NO: 32164 - DNA, 22 bp, Artificial Sequence
  chemically synthesized
aggcaagtagttactccaattg

SEQ ID NO: 32165 - DNA, 22 bp, Artificial Sequence
  chemically synthesized
ggcaagtagttactccaattgt

SEQ ID NO: 32166 - DNA, 22 bp, Artificial Sequence
  chemically synthesized
ctccaattgtcttttcagactc

SEQ ID NO: 32167 - DNA, 22 bp, Artificial Sequence
  chemically synthesized
caattgtcttttcagactcttt

SEQ ID NO: 32168 - DNA, 22 bp, Artificial Sequence
  chemically synthesized
tcttttcagactctttcttttt

SEQ ID NO: 32169 - DNA, 22 bp, Artificial Sequence
  chemically synthesized
ttcagactctttctttttgagg

SEQ ID NO: 32170 - DNA, 22 bp, Artificial Sequence
  chemically synthesized
tcagactctttctttttgaggt

SEQ ID NO: 32171 - DNA, 22 bp, Artificial Sequence
  chemically synthesized
cagactctttctttttgaggta

SEQ ID NO: 32172 - DNA, 22 bp, Artificial Sequence
  chemically synthesized
agactctttctttttgaggtat

SEQ ID NO: 32173 - DNA, 22 bp, Artificial Sequence
  chemically synthesized
tttctttttgaggtatttgacc

SEQ ID NO: 32174 - DNA, 22 bp, Artificial Sequence
  chemically synthesized
tctttttgaggtatttgacctc

SEQ ID NO: 32175 - DNA, 22 bp, Artificial Sequence
  chemically synthesized
ctttttgaggtatttgacctct

SEQ ID NO: 32176 - DNA, 22 bp, Artificial Sequence
  chemically synthesized
tttttgaggtatttgacctctt

SEQ ID NO: 32177 - DNA, 22 bp, Artificial Sequence
  chemically synthesized
tttgaggtatttgacctctttg

SEQ ID NO: 32178 - DNA, 22 bp, Artificial Sequence
  chemically synthesized
ttgaggtatttgacctctttgc

SEQ ID NO: 32179 - DNA, 22 bp, Artificial Sequence
  chemically synthesized
tgaggtatttgacctctttgcg

SEQ ID NO: 32180 - DNA, 22 bp, Artificial Sequence
  chemically synthesized
gaggtatttgacctctttgcgg

SEQ ID NO: 32181 - DNA, 22 bp, Artificial Sequence
  chemically synthesized
aggtatttgacctctttgcggc

SEQ ID NO: 32182 - DNA, 22 bp, Artificial Sequence
  chemically synthesized
gacctctttgcggcatcagcct

SEQ ID NO: 32183 - DNA, 22 bp, Artificial Sequence
  chemically synthesized
acctctttgcggcatcagcctg

SEQ ID NO: 32184 - DNA, 22 bp, Artificial Sequence
  chemically synthesized
tttgcggcatcagcctgctgct

SEQ ID NO: 32185 - DNA, 22 bp, Artificial Sequence
  chemically synthesized
tgcggcatcagcctgctgctat

SEQ ID NO: 32186 - DNA, 22 bp, Artificial Sequence
  chemically synthesized
gcggcatcagcctgctgctatt

SEQ ID NO: 32187 - DNA, 22 bp, Artificial Sequence
  chemically synthesized
cggcatcagcctgctgctattt

SEQ ID NO: 32188 - DNA, 22 bp, Artificial Sequence
  chemically synthesized
ctgctatttcacatgcacctag

SEQ ID NO: 32189 - DNA, 22 bp, Artificial Sequence
  chemically synthesized
ctatttcacatgcacctagaag

SEQ ID NO: 32190 - DNA, 22 bp, Artificial Sequence
  chemically synthesized
tttcacatgcacctagaaggga

SEQ ID NO: 32191 - DNA, 22 bp, Artificial Sequence
  chemically synthesized
cacatgcacctagaagggactt

SEQ ID NO: 32192 - DNA, 22 bp, Artificial Sequence
  chemically synthesized
acatgcacctagaagggacttt

SEQ ID NO: 32193 - DNA, 22 bp, Artificial Sequence
  chemically synthesized
gaagggactttaaaacatgcac

SEQ ID NO: 32194 - DNA, 22 bp, Artificial Sequence
  chemically synthesized
taaaacatgcacagaattgaac

SEQ ID NO: 32195 - DNA, 22 bp, Artificial Sequence
  chemically synthesized
aaaacatgcacagaattgaaca

SEQ ID NO: 32196 - DNA, 22 bp, Artificial Sequence
  chemically synthesized
aaacatgcacagaattgaacaa

SEQ ID NO: 32197 - DNA, 22 bp, Artificial Sequence
  chemically synthesized
aacaaagcagtaaccattcgtt

SEQ ID NO: 32198 - DNA, 22 bp, Artificial Sequence
  chemically synthesized
gttggtgtcccttaacaatatg

SEQ ID NO: 32199 - DNA, 22 bp, Artificial Sequence
  chemically synthesized
gtgtcccttaacaatatgtcaa

SEQ ID NO: 32200 - DNA, 22 bp, Artificial Sequence
  chemically synthesized
aacaatatgtcaaatactatta

SEQ ID NO: 32201 - DNA, 22 bp, Artificial Sequence
  chemically synthesized
acaatatgtcaaatactattat

SEQ ID NO: 32202 - DNA, 22 bp, Artificial Sequence
  chemically synthesized
ttatttttgaaaggtaaataaa

SEQ ID NO: 32203 - DNA, 22 bp, Artificial Sequence
  chemically synthesized
tttttgaaaggtaaataaatcc

SEQ ID NO: 32204 - DNA, 22 bp, Artificial Sequence
  chemically synthesized
ttgaaaggtaaataaatccttg

SEQ ID NO: 32205 - DNA, 22 bp, Artificial Sequence
  chemically synthesized
tgaaaggtaaataaatccttgg

SEQ ID NO: 32206 - DNA, 22 bp, Artificial Sequence
  chemically synthesized
gaaaggtaaataaatccttggg

SEQ ID NO: 32207 - DNA, 22 bp, Artificial Sequence
  chemically synthesized
aaaggtaaataaatccttgggc

SEQ ID NO: 32208 - DNA, 22 bp, Artificial Sequence
  chemically synthesized
gggcttagtggatcctaaatgc

SEQ ID NO: 32209 - DNA, 22 bp, Artificial Sequence
  chemically synthesized
ggcttagtggatcctaaatgct

SEQ ID NO: 32210 - DNA, 22 bp, Artificial Sequence
  chemically synthesized
agtggatcctaaatgctaattt

SEQ ID NO: 32211 - DNA, 22 bp, Artificial Sequence
  chemically synthesized
gtggatcctaaatgctaattta

SEQ ID NO: 32212 - DNA, 22 bp, Artificial Sequence
  chemically synthesized
aatgctaatttaaaaatctgaa

SEQ ID NO: 32213 - DNA, 22 bp, Artificial Sequence
  chemically synthesized
atttaaaaatctgaactcattt

SEQ ID NO: 32214 - DNA, 22 bp, Artificial Sequence
  chemically synthesized
aaaaatctgaactcatttccat

SEQ ID NO: 32215 - DNA, 22 bp, Artificial Sequence
  chemically synthesized
aaaatctgaactcatttccatc

SEQ ID NO: 32216 - DNA, 22 bp, Artificial Sequence
  chemically synthesized
aactcatttccatcccttatta

SEQ ID NO: 32217 - DNA, 22 bp, Artificial Sequence
  chemically synthesized
atttccatcccttattacttta

SEQ ID NO: 32218 - DNA, 22 bp, Artificial Sequence
  chemically synthesized
ccatcccttattactttaaaca

SEQ ID NO: 32219 - DNA, 22 bp, Artificial Sequence
  chemically synthesized
catcccttattactttaaacaa

SEQ ID NO: 32220 - DNA, 22 bp, Artificial Sequence
  chemically synthesized
attactttaaacaaattgctaa

SEQ ID NO: 32221 - DNA, 22 bp, Artificial Sequence
  chemically synthesized
ttactttaaacaaattgctaac

SEQ ID NO: 32222 - DNA, 22 bp, Artificial Sequence
  chemically synthesized
ctttaaacaaattgctaacctg

SEQ ID NO: 32223 - DNA, 22 bp, Artificial Sequence
  chemically synthesized
taaacaaattgctaacctgaat

SEQ ID NO: 32224 - DNA, 22 bp, Artificial Sequence
  chemically synthesized
aaacaaattgctaacctgaatg

SEQ ID NO: 32225 - DNA, 22 bp, Artificial Sequence
  chemically synthesized
aacaaattgctaacctgaatga

SEQ ID NO: 32226 - DNA, 22 bp, Artificial Sequence
  chemically synthesized
ctaacctgaatgataatagaaa

SEQ ID NO: 32227 - DNA, 22 bp, Artificial Sequence
  chemically synthesized
acctgaatgataatagaaactt

SEQ ID NO: 32228 - DNA, 22 bp, Artificial Sequence
  chemically synthesized
aatgataatagaaacttttttc

SEQ ID NO: 32229 - DNA, 22 bp, Artificial Sequence
  chemically synthesized
ttttccttttaacagttggagg

SEQ ID NO: 32230 - DNA, 22 bp, Artificial Sequence
  chemically synthesized
tttccttttaacagttggaggc

SEQ ID NO: 32231 - DNA, 22 bp, Artificial Sequence
  chemically synthesized
ttccttttaacagttggaggca

SEQ ID NO: 32232 - DNA, 22 bp, Artificial Sequence
  chemically synthesized
tccttttaacagttggaggcat

SEQ ID NO: 32233 - DNA, 22 bp, Artificial Sequence
  chemically synthesized
ccttttaacagttggaggcatc

SEQ ID NO: 32234 - DNA, 22 bp, Artificial Sequence
  chemically synthesized
cttttaacagttggaggcatct

SEQ ID NO: 32235 - DNA, 22 bp, Artificial Sequence
  chemically synthesized
ttaacagttggaggcatctata

SEQ ID NO: 32236 - DNA, 22 bp, Artificial Sequence
  chemically synthesized
taacagttggaggcatctatac

SEQ ID NO: 32237 - DNA, 22 bp, Artificial Sequence
  chemically synthesized
aacagttggaggcatctatact

SEQ ID NO: 32238 - DNA, 22 bp, Artificial Sequence
  chemically synthesized
acagttggaggcatctatactg

SEQ ID NO: 32239 - DNA, 22 bp, Artificial Sequence
  chemically synthesized
gaggcatctatactgtgattca

SEQ ID NO: 32240 - DNA, 22 bp, Artificial Sequence
  chemically synthesized
tactgtgattcagacaaaggcc

SEQ ID NO: 32241 - DNA, 22 bp, Artificial Sequence
  chemically synthesized
tgattcagacaaaggccaaaac

SEQ ID NO: 32242 - DNA, 22 bp, Artificial Sequence
  chemically synthesized
agacaaaggccaaaacaacagc

SEQ ID NO: 32243 - DNA, 22 bp, Artificial Sequence
  chemically synthesized
ttttctgataggtccatatttt

SEQ ID NO: 32244 - DNA, 22 bp, Artificial Sequence
  chemically synthesized
tctgataggtccatattttgag

SEQ ID NO: 32245 - DNA, 22 bp, Artificial Sequence
  chemically synthesized
ctgataggtccatattttgagc

SEQ ID NO: 32246 - DNA, 22 bp, Artificial Sequence
  chemically synthesized
tgataggtccatattttgagca

SEQ ID NO: 32247 - DNA, 22 bp, Artificial Sequence
  chemically synthesized
ataggtccatattttgagcata

SEQ ID NO: 32248 - DNA, 22 bp, Artificial Sequence
  chemically synthesized
tgagcataatatgaagactcag

SEQ ID NO: 32249 - DNA, 22 bp, Artificial Sequence
  chemically synthesized
gagcataatatgaagactcagg

SEQ ID NO: 32250 - DNA, 22 bp, Artificial Sequence
  chemically synthesized
agcataatatgaagactcaggt

SEQ ID NO: 32251 - DNA, 22 bp, Artificial Sequence
  chemically synthesized
aggtggaacagtgtgaacctgt

SEQ ID NO: 32252 - DNA, 22 bp, Artificial Sequence
  chemically synthesized
taaatgatgctgtcagaagagc

SEQ ID NO: 32253 - DNA, 22 bp, Artificial Sequence
  chemically synthesized
tcagaagagcagtggacgcaat

SEQ ID NO: 32254 - DNA, 20 bp, Artificial Sequence
  chemically synthesized
tgtccttctggcagggaacc

SEQ ID NO: 32255 - DNA, 20 bp, Artificial Sequence
  chemically synthesized
gtccttctggcagggaacct

SEQ ID NO: 32256 - DNA, 20 bp, Artificial Sequence
  chemically synthesized
cttctggcagggaacctggg

SEQ ID NO: 32257 - DNA, 20 bp, Artificial Sequence
  chemically synthesized
tggcagggaacctgggcagc

SEQ ID NO: 32258 - DNA, 20 bp, Artificial Sequence
  chemically synthesized
ggcagggaacctgggcagcg

SEQ ID NO: 32259 - DNA, 20 bp, Artificial Sequence
  chemically synthesized
tgggcagcgaggatcctctg

SEQ ID NO: 32260 - DNA, 20 bp, Artificial Sequence
  chemically synthesized
agaacactcattcccaaatc

SEQ ID NO: 32261 - DNA, 20 bp, Artificial Sequence
  chemically synthesized
ccaaatccagaaatgtactg

SEQ ID NO: 32262 - DNA, 20 bp, Artificial Sequence
  chemically synthesized
caaatccagaaatgtactgt

SEQ ID NO: 32263 - DNA, 20 bp, Artificial Sequence
  chemically synthesized
gaaatgtactgtaggtgaca

SEQ ID NO: 32264 - DNA, 20 bp, Artificial Sequence
  chemically synthesized
aaagacacaaatgccaccat

SEQ ID NO: 32265 - DNA, 20 bp, Artificial Sequence
  chemically synthesized
gacacaaatgccaccattag

SEQ ID NO: 32266 - DNA, 20 bp, Artificial Sequence
  chemically synthesized
acacaaatgccaccattagc

SEQ ID NO: 32267 - DNA, 20 bp, Artificial Sequence
  chemically synthesized
gccaccattagcaggattta

SEQ ID NO: 32268 - DNA, 20 bp, Artificial Sequence
  chemically synthesized
caccattagcaggatttaaa

SEQ ID NO: 32269 - DNA, 20 bp, Artificial Sequence
  chemically synthesized
gcaggatttaaagagcattt

SEQ ID NO: 32270 - DNA, 20 bp, Artificial Sequence
  chemically synthesized
taaagagcatttcagaaaat

SEQ ID NO: 32271 - DNA, 20 bp, Artificial Sequence
  chemically synthesized
agagcatttcagaaaattgg

SEQ ID NO: 32272 - DNA, 20 bp, Artificial Sequence
  chemically synthesized
cagaaaattggcagtttact

SEQ ID NO: 32273 - DNA, 20 bp, Artificial Sequence
  chemically synthesized
agaaaattggcagtttacta

SEQ ID NO: 32274 - DNA, 20 bp, Artificial Sequence
  chemically synthesized
aattggcagtttactaaggt

SEQ ID NO: 32275 - DNA, 20 bp, Artificial Sequence
  chemically synthesized
ctaaggtaagaatttctata

SEQ ID NO: 32276 - DNA, 20 bp, Artificial Sequence
  chemically synthesized
gtcttgacatatgaatcatt

SEQ ID NO: 32277 - DNA, 20 bp, Artificial Sequence
  chemically synthesized
tcttgacatatgaatcattt

SEQ ID NO: 32278 - DNA, 20 bp, Artificial Sequence
  chemically synthesized
cttgacatatgaatcattta

SEQ ID NO: 32279 - DNA, 20 bp, Artificial Sequence
  chemically synthesized
gacatatgaatcatttaggg

SEQ ID NO: 32280 - DNA, 20 bp, Artificial Sequence
  chemically synthesized
atcatttagggaagacaata

SEQ ID NO: 32281 - DNA, 20 bp, Artificial Sequence
  chemically synthesized
tatggtttctgtgaatttta

SEQ ID NO: 32282 - DNA, 20 bp, Artificial Sequence
  chemically synthesized
tttaaagacttctaattaat

SEQ ID NO: 32283 - DNA, 20 bp, Artificial Sequence
  chemically synthesized
aaagacttctaattaatcag

SEQ ID NO: 32284 - DNA, 20 bp, Artificial Sequence
  chemically synthesized
agacttctaattaatcagaa

SEQ ID NO: 32285 - DNA, 20 bp, Artificial Sequence
  chemically synthesized
ctaattaatcagaagagtgc

SEQ ID NO: 32286 - DNA, 20 bp, Artificial Sequence
  chemically synthesized
gaagagtgctggatattgca

SEQ ID NO: 32287 - DNA, 20 bp, Artificial Sequence
  chemically synthesized
tgcatagacttctccaccct

SEQ ID NO: 32288 - DNA, 20 bp, Artificial Sequence
  chemically synthesized
tctccacccttagctgtact

SEQ ID NO: 32289 - DNA, 20 bp, Artificial Sequence
  chemically synthesized
agctgtacttagctgatttg

SEQ ID NO: 32290 - DNA, 20 bp, Artificial Sequence
  chemically synthesized
gctgtacttagctgatttgt

SEQ ID NO: 32291 - DNA, 20 bp, Artificial Sequence
  chemically synthesized
actgtaacctccctgaactt

SEQ ID NO: 32292 - DNA, 20 bp, Artificial Sequence
  chemically synthesized
tccatttccctttcaaactc

SEQ ID NO: 32293 - DNA, 20 bp, Artificial Sequence
  chemically synthesized
ccatttccctttcaaactct

SEQ ID NO: 32294 - DNA, 20 bp, Artificial Sequence
  chemically synthesized
tttcaaactctgggaaaaaa

SEQ ID NO: 32295 - DNA, 20 bp, Artificial Sequence
  chemically synthesized
actctgggaaaaaaaagaaa

SEQ ID NO: 32296 - DNA, 20 bp, Artificial Sequence
  chemically synthesized
aaaaagaaaaagcatctatg

SEQ ID NO: 32297 - DNA, 20 bp, Artificial Sequence
  chemically synthesized
aaagaaaaagcatctatgaa

SEQ ID NO: 32298 - DNA, 20 bp, Artificial Sequence
  chemically synthesized
aagaaaaagcatctatgaag

SEQ ID NO: 32299 - DNA, 20 bp, Artificial Sequence
  chemically synthesized
agcatctatgaagaggtgtg

SEQ ID NO: 32300 - DNA, 20 bp, Artificial Sequence
  chemically synthesized
gcatctatgaagaggtgtgt

SEQ ID NO: 32301 - DNA, 20 bp, Artificial Sequence
  chemically synthesized
gtgtgtgggtccaaccctga

SEQ ID NO: 32302 - DNA, 20 bp, Artificial Sequence
  chemically synthesized
cagcaaaaccctctccaaac

SEQ ID NO: 32303 - DNA, 20 bp, Artificial Sequence
  chemically synthesized
tctccaaactagccttgctg

SEQ ID NO: 32304 - DNA, 20 bp, Artificial Sequence
  chemically synthesized
ctccaaactagccttgctgt

SEQ ID NO: 32305 - DNA, 20 bp, Artificial Sequence
  chemically synthesized
caaactagccttgctgtagg

SEQ ID NO: 32306 - DNA, 20 bp, Artificial Sequence
  chemically synthesized
actagccttgctgtaggcag

SEQ ID NO: 32307 - DNA, 20 bp, Artificial Sequence
  chemically synthesized
tctgctatctgcctcatcta

SEQ ID NO: 32308 - DNA, 20 bp, Artificial Sequence
  chemically synthesized
tgtgcgaatgcatgaaaata

SEQ ID NO: 32309 - DNA, 20 bp, Artificial Sequence
  chemically synthesized
atgcatgaaaataaagttta

SEQ ID NO: 32310 - DNA, 20 bp, Artificial Sequence
  chemically synthesized
gaaaataaagtttaaagata

SEQ ID NO: 32311 - DNA, 20 bp, Artificial Sequence
  chemically synthesized
aaaataaagtttaaagatat

SEQ ID NO: 32312 - DNA, 20 bp, Artificial Sequence
  chemically synthesized
ataaagtttaaagatatggg

SEQ ID NO: 32313 - DNA, 20 bp, Artificial Sequence
  chemically synthesized
ttaaagatatgggtggcctt

SEQ ID NO: 32314 - DNA, 20 bp, Artificial Sequence
  chemically synthesized
taaagatatgggtggccttc

SEQ ID NO: 32315 - DNA, 20 bp, Artificial Sequence
  chemically synthesized
aagatatgggtggccttcag

SEQ ID NO: 32316 - DNA, 20 bp, Artificial Sequence
  chemically synthesized
gtggccttcaggagacacgc

SEQ ID NO: 32317 - DNA, 20 bp, Artificial Sequence
  chemically synthesized
cttcaggagacacgccagcc

SEQ ID NO: 32318 - DNA, 20 bp, Artificial Sequence
  chemically synthesized
atcttttcacaatgacacaa

SEQ ID NO: 32319 - DNA, 20 bp, Artificial Sequence
  chemically synthesized
ccatctcttcactttacacc

SEQ ID NO: 32320 - DNA, 20 bp, Artificial Sequence
  chemically synthesized
atctcttcactttacaccca

SEQ ID NO: 32321 - DNA, 20 bp, Artificial Sequence
  chemically synthesized
tctcttcactttacacccag

SEQ ID NO: 32322 - DNA, 20 bp, Artificial Sequence
  chemically synthesized
ttacacccagaggaaaaaaa

SEQ ID NO: 32323 - DNA, 20 bp, Artificial Sequence
  chemically synthesized
ccagaggaaaaaaaaagtta

SEQ ID NO: 32324 - DNA, 20 bp, Artificial Sequence
  chemically synthesized
cagaggaaaaaaaaagttaa

SEQ ID NO: 32325 - DNA, 20 bp, Artificial Sequence
  chemically synthesized
agaggaaaaaaaaagttaaa

SEQ ID NO: 32326 - DNA, 20 bp, Artificial Sequence
  chemically synthesized
aagttaaagggtttctcaac

SEQ ID NO: 32327 - DNA, 20 bp, Artificial Sequence
  chemically synthesized
agttaaagggtttctcaacc

SEQ ID NO: 32328 - DNA, 20 bp, Artificial Sequence
  chemically synthesized
aaagggtttctcaaccaggt

SEQ ID NO: 32329 - DNA, 20 bp, Artificial Sequence
  chemically synthesized
tttctcaaccaggtaagtca

SEQ ID NO: 32330 - DNA, 20 bp, Artificial Sequence
  chemically synthesized
tctcaaccaggtaagtcatg

SEQ ID NO: 32331 - DNA, 20 bp, Artificial Sequence
  chemically synthesized
tcaaccaggtaagtcatgga

SEQ ID NO: 32332 - DNA, 20 bp, Artificial Sequence
  chemically synthesized
gcaacactcaacacacttgt

SEQ ID NO: 32333 - DNA, 20 bp, Artificial Sequence
  chemically synthesized
gtgagttcttgtgcactgtc

SEQ ID NO: 32334 - DNA, 20 bp, Artificial Sequence
  chemically synthesized
gcactgtctggcttttttgc

SEQ ID NO: 32335 - DNA, 20 bp, Artificial Sequence
  chemically synthesized
tggcttttttgctagcctat

SEQ ID NO: 32336 - DNA, 20 bp, Artificial Sequence
  chemically synthesized
gctagcctataagctgcatg

SEQ ID NO: 32337 - DNA, 20 bp, Artificial Sequence
  chemically synthesized
ctagcctataagctgcatga

SEQ ID NO: 32338 - DNA, 20 bp, Artificial Sequence
  chemically synthesized
ctataagctgcatgaaggct

SEQ ID NO: 32339 - DNA, 20 bp, Artificial Sequence
  chemically synthesized
ctgcatgaaggctgagacta

SEQ ID NO: 32340 - DNA, 20 bp, Artificial Sequence
  chemically synthesized
catgaaggctgagactatgg

SEQ ID NO: 32341 - DNA, 20 bp, Artificial Sequence
  chemically synthesized
ggctgagactatggcagtct

SEQ ID NO: 32342 - DNA, 20 bp, Artificial Sequence
  chemically synthesized
actatggcagtcttggctca

SEQ ID NO: 32343 - DNA, 20 bp, Artificial Sequence
  chemically synthesized
atggcagtcttggctcatag

SEQ ID NO: 32344 - DNA, 20 bp, Artificial Sequence
  chemically synthesized
tggcagtcttggctcataga

SEQ ID NO: 32345 - DNA, 20 bp, Artificial Sequence
  chemically synthesized
cttggctcatagaaggtaat

SEQ ID NO: 32346 - DNA, 20 bp, Artificial Sequence
  chemically synthesized
ggctcatagaaggtaatcag

SEQ ID NO: 32347 - DNA, 20 bp, Artificial Sequence
  chemically synthesized
ttgattgaatttttccctta

SEQ ID NO: 32348 - DNA, 20 bp, Artificial Sequence
  chemically synthesized
cttaaagccaattctaatgt

SEQ ID NO: 32349 - DNA, 20 bp, Artificial Sequence
  chemically synthesized
tgtatgtgtgctgctgtaaa

SEQ ID NO: 32350 - DNA, 20 bp, Artificial Sequence
  chemically synthesized
gtatgtgtgctgctgtaaat

SEQ ID NO: 32351 - DNA, 20 bp, Artificial Sequence
  chemically synthesized
tatgtgtgctgctgtaaata

SEQ ID NO: 32352 - DNA, 20 bp, Artificial Sequence
  chemically synthesized
tgtgctgctgtaaatagggt

SEQ ID NO: 32353 - DNA, 20 bp, Artificial Sequence
  chemically synthesized
acttaaataccaattgattt

SEQ ID NO: 32354 - DNA, 20 bp, Artificial Sequence
  chemically synthesized
aataccaattgattttagcc

SEQ ID NO: 32355 - DNA, 20 bp, Artificial Sequence
  chemically synthesized
ataccaattgattttagccc

SEQ ID NO: 32356 - DNA, 20 bp, Artificial Sequence
  chemically synthesized
agcccaggataatgaaaatg

SEQ ID NO: 32357 - DNA, 20 bp, Artificial Sequence
  chemically synthesized
aatgaaaatgcagtcttgct

SEQ ID NO: 32358 - DNA, 20 bp, Artificial Sequence
  chemically synthesized
aaaatgcagtcttgctcagc

SEQ ID NO: 32359 - DNA, 20 bp, Artificial Sequence
  chemically synthesized
gaaatgtaaccatctgaaca

SEQ ID NO: 32360 - DNA, 20 bp, Artificial Sequence
  chemically synthesized
ccatctgaacacagctcctt

SEQ ID NO: 32361 - DNA, 20 bp, Artificial Sequence
  chemically synthesized
atctgaacacagctccttaa

SEQ ID NO: 32362 - DNA, 20 bp, Artificial Sequence
  chemically synthesized
cacagctccttaagagatat

SEQ ID NO: 32363 - DNA, 20 bp, Artificial Sequence
  chemically synthesized
agctccttaagagatataag

SEQ ID NO: 32364 - DNA, 20 bp, Artificial Sequence
  chemically synthesized
gctccttaagagatataaga

SEQ ID NO: 32365 - DNA, 20 bp, Artificial Sequence
  chemically synthesized
ctccttaagagatataagaa

SEQ ID NO: 32366 - DNA, 20 bp, Artificial Sequence
  chemically synthesized
cttaagagatataagaaggg

SEQ ID NO: 32367 - DNA, 20 bp, Artificial Sequence
  chemically synthesized
aagagatataagaagggtgg

SEQ ID NO: 32368 - DNA, 20 bp, Artificial Sequence
  chemically synthesized
agatataagaagggtggaag

SEQ ID NO: 32369 - DNA, 20 bp, Artificial Sequence
  chemically synthesized
gatataagaagggtggaagt

SEQ ID NO: 32370 - DNA, 20 bp, Artificial Sequence
  chemically synthesized
aagaagggtggaagtgggtg

SEQ ID NO: 32371 - DNA, 20 bp, Artificial Sequence
  chemically synthesized
agaagggtggaagtgggtga

SEQ ID NO: 32372 - DNA, 20 bp, Artificial Sequence
  chemically synthesized
gaagggtggaagtgggtgaa

SEQ ID NO: 32373 - DNA, 20 bp, Artificial Sequence
  chemically synthesized
gggtggaagtgggtgaaggg

SEQ ID NO: 32374 - DNA, 20 bp, Artificial Sequence
  chemically synthesized
ggtggaagtgggtgaagggt

SEQ ID NO: 32375 - DNA, 20 bp, Artificial Sequence
  chemically synthesized
tgggtgaagggtaggccctc

SEQ ID NO: 32376 - DNA, 20 bp, Artificial Sequence
  chemically synthesized
ggtgaagggtaggccctcca

SEQ ID NO: 32377 - DNA, 20 bp, Artificial Sequence
  chemically synthesized
ggtaggccctccagagttct

SEQ ID NO: 32378 - DNA, 20 bp, Artificial Sequence
  chemically synthesized
tccagagttctcagttgttg

SEQ ID NO: 32379 - DNA, 20 bp, Artificial Sequence
  chemically synthesized
ccagagttctcagttgttgc

SEQ ID NO: 32380 - DNA, 20 bp, Artificial Sequence
  chemically synthesized
gagttctcagttgttgcggg

SEQ ID NO: 32381 - DNA, 20 bp, Artificial Sequence
  chemically synthesized
ctcagttgttgcgggaagtc

SEQ ID NO: 32382 - DNA, 20 bp, Artificial Sequence
  chemically synthesized
tcagttgttgcgggaagtct

SEQ ID NO: 32383 - DNA, 20 bp, Artificial Sequence
  chemically synthesized
gggaagtctgggactccaaa

SEQ ID NO: 32384 - DNA, 20 bp, Artificial Sequence
  chemically synthesized
gaagtctgggactccaaacg

SEQ ID NO: 32385 - DNA, 20 bp, Artificial Sequence
  chemically synthesized
aagtctgggactccaaacgg

SEQ ID NO: 32386 - DNA, 20 bp, Artificial Sequence
  chemically synthesized
agtctgggactccaaacgga

SEQ ID NO: 32387 - DNA, 20 bp, Artificial Sequence
  chemically synthesized
gggactccaaacggagggat

SEQ ID NO: 32388 - DNA, 20 bp, Artificial Sequence
  chemically synthesized
ccaaacggagggatcagctg

SEQ ID NO: 32389 - DNA, 20 bp, Artificial Sequence
  chemically synthesized
ggagggatcagctgaagcca

SEQ ID NO: 32390 - DNA, 20 bp, Artificial Sequence
  chemically synthesized
gggatcagctgaagccatgg

SEQ ID NO: 32391 - DNA, 20 bp, Artificial Sequence
  chemically synthesized
atcagctgaagccatggcag

SEQ ID NO: 32392 - DNA, 20 bp, Artificial Sequence
  chemically synthesized
gaagccatggcagaagttcg

SEQ ID NO: 32393 - DNA, 20 bp, Artificial Sequence
  chemically synthesized
gcagaagttcgtggattgtg

SEQ ID NO: 32394 - DNA, 20 bp, Artificial Sequence
  chemically synthesized
cgtggattgtgaagatttca

SEQ ID NO: 32395 - DNA, 20 bp, Artificial Sequence
  chemically synthesized
aagatttcatggacatttat

SEQ ID NO: 32396 - DNA, 20 bp, Artificial Sequence
  chemically synthesized
atctctaaacataaattgta

SEQ ID NO: 32397 - DNA, 20 bp, Artificial Sequence
  chemically synthesized
cataaattgtaaagatttca

SEQ ID NO: 32398 - DNA, 20 bp, Artificial Sequence
  chemically synthesized
atggacacttatcacttccc

SEQ ID NO: 32399 - DNA, 20 bp, Artificial Sequence
  chemically synthesized
ctttaatctcttaatcctgt

SEQ ID NO: 32400 - DNA, 20 bp, Artificial Sequence
  chemically synthesized
atctcttaatcctgtcagct

SEQ ID NO: 32401 - DNA, 20 bp, Artificial Sequence
  chemically synthesized
tctcttaatcctgtcagctg

SEQ ID NO: 32402 - DNA, 20 bp, Artificial Sequence
  chemically synthesized
tcttaatcctgtcagctgag

SEQ ID NO: 32403 - DNA, 20 bp, Artificial Sequence
  chemically synthesized
cttaatcctgtcagctgagg

SEQ ID NO: 32404 - DNA, 20 bp, Artificial Sequence
  chemically synthesized
gaggaggatgtatattgcct

SEQ ID NO: 32405 - DNA, 20 bp, Artificial Sequence
  chemically synthesized
aggaggatgtatattgcctc

SEQ ID NO: 32406 - DNA, 20 bp, Artificial Sequence
  chemically synthesized
cattaactgcacaaattgta

SEQ ID NO: 32407 - DNA, 20 bp, Artificial Sequence
  chemically synthesized
attgtacagcatgtgtgttt

SEQ ID NO: 32408 - DNA, 20 bp, Artificial Sequence
  chemically synthesized
tgtttgagcaacatgaaatg

SEQ ID NO: 32409 - DNA, 20 bp, Artificial Sequence
  chemically synthesized
aaatgtggacaccttgaaaa

SEQ ID NO: 32410 - DNA, 20 bp, Artificial Sequence
  chemically synthesized
tggacaccttgaaaaaagaa

SEQ ID NO: 32411 - DNA, 20 bp, Artificial Sequence
  chemically synthesized
ggacaccttgaaaaaagaac

SEQ ID NO: 32412 - DNA, 20 bp, Artificial Sequence
  chemically synthesized
ttgaaaaaagaacaggataa

SEQ ID NO: 32413 - DNA, 20 bp, Artificial Sequence
  chemically synthesized
acaggataacagcaattgtt

SEQ ID NO: 32414 - DNA, 20 bp, Artificial Sequence
  chemically synthesized
caggataacagcaattgttc

SEQ ID NO: 32415 - DNA, 20 bp, Artificial Sequence
  chemically synthesized
aggataacagcaattgttca

SEQ ID NO: 32416 - DNA, 20 bp, Artificial Sequence
  chemically synthesized
acagcaattgttcagggaat

SEQ ID NO: 32417 - DNA, 20 bp, Artificial Sequence
  chemically synthesized
agcaattgttcagggaataa

SEQ ID NO: 32418 - DNA, 20 bp, Artificial Sequence
  chemically synthesized
caattgttcagggaataaga

SEQ ID NO: 32419 - DNA, 20 bp, Artificial Sequence
  chemically synthesized
taaccttaaactctgactgc

SEQ ID NO: 32420 - DNA, 20 bp, Artificial Sequence
  chemically synthesized
cttaaactctgactgctggt

SEQ ID NO: 32421 - DNA, 20 bp, Artificial Sequence
  chemically synthesized
aactctgactgctggtgagc

SEQ ID NO: 32422 - DNA, 20 bp, Artificial Sequence
  chemically synthesized
actctgactgctggtgagcc

SEQ ID NO: 32423 - DNA, 20 bp, Artificial Sequence
  chemically synthesized
ctgactgctggtgagccagg

SEQ ID NO: 32424 - DNA, 20 bp, Artificial Sequence
  chemically synthesized
tgctggtgagccaggcagaa

SEQ ID NO: 32425 - DNA, 20 bp, Artificial Sequence
  chemically synthesized
ctggtgagccaggcagaaca

SEQ ID NO: 32426 - DNA, 20 bp, Artificial Sequence
  chemically synthesized
ccatatttctcttctttcaa

SEQ ID NO: 32427 - DNA, 20 bp, Artificial Sequence
  chemically synthesized
tctcttctttcaaaagcaaa

SEQ ID NO: 32428 - DNA, 20 bp, Artificial Sequence
  chemically synthesized
ctcttctttcaaaagcaaat

SEQ ID NO: 32429 - DNA, 20 bp, Artificial Sequence
  chemically synthesized
cttctttcaaaagcaaatgg

SEQ ID NO: 32430 - DNA, 20 bp, Artificial Sequence
  chemically synthesized
tatcgctgaattctttttct

SEQ ID NO: 32431 - DNA, 20 bp, Artificial Sequence
  chemically synthesized
ctgaattctttttctcagca

SEQ ID NO: 32432 - DNA, 20 bp, Artificial Sequence
  chemically synthesized
tctcagcatggaacatccct

SEQ ID NO: 32433 - DNA, 20 bp, Artificial Sequence
  chemically synthesized
agcatggaacatccctgaga

SEQ ID NO: 32434 - DNA, 20 bp, Artificial Sequence
  chemically synthesized
catggaacatccctgagaaa

SEQ ID NO: 32435 - DNA, 20 bp, Artificial Sequence
  chemically synthesized
atccctgagaaagagaatac

SEQ ID NO: 32436 - DNA, 20 bp, Artificial Sequence
  chemically synthesized
ctgagaaagagaatacgagc

SEQ ID NO: 32437 - DNA, 20 bp, Artificial Sequence
  chemically synthesized
tgagaaagagaatacgagcc

SEQ ID NO: 32438 - DNA, 20 bp, Artificial Sequence
  chemically synthesized
agaaagagaatacgagccag

SEQ ID NO: 32439 - DNA, 20 bp, Artificial Sequence
  chemically synthesized
gaaagagaatacgagccagg

SEQ ID NO: 32440 - DNA, 20 bp, Artificial Sequence
  chemically synthesized
agaatacgagccaggaggta

SEQ ID NO: 32441 - DNA, 20 bp, Artificial Sequence
  chemically synthesized
gaatacgagccaggaggtat

SEQ ID NO: 32442 - DNA, 20 bp, Artificial Sequence
  chemically synthesized
aggaggtataggcttataaa

SEQ ID NO: 32443 - DNA, 20 bp, Artificial Sequence
  chemically synthesized
gcttataaacagcccccctc

SEQ ID NO: 32444 - DNA, 20 bp, Artificial Sequence
  chemically synthesized
cttataaacagcccccctcc

SEQ ID NO: 32445 - DNA, 20 bp, Artificial Sequence
  chemically synthesized
ccaggtgcgcctgtctctta

SEQ ID NO: 32446 - DNA, 20 bp, Artificial Sequence
  chemically synthesized
tgcgcctgtctcttatggtc

SEQ ID NO: 32447 - DNA, 20 bp, Artificial Sequence
  chemically synthesized
gtctcttatggtcgagactg

SEQ ID NO: 32448 - DNA, 20 bp, Artificial Sequence
  chemically synthesized
tctcttatggtcgagactgc

SEQ ID NO: 32449 - DNA, 20 bp, Artificial Sequence
  chemically synthesized
ctcttatggtcgagactgca

SEQ ID NO: 32450 - DNA, 20 bp, Artificial Sequence
  chemically synthesized
tcttatggtcgagactgcag

SEQ ID NO: 32451 - DNA, 20 bp, Artificial Sequence
  chemically synthesized
tcgagactgcaggggtgaaa

SEQ ID NO: 32452 - DNA, 20 bp, Artificial Sequence
  chemically synthesized
tgcaggggtgaaatagaccc

SEQ ID NO: 32453 - DNA, 20 bp, Artificial Sequence
  chemically synthesized
aaatagaccccagtctccca

SEQ ID NO: 32454 - DNA, 20 bp, Artificial Sequence
  chemically synthesized
ccagtctcccacagcgctcc

SEQ ID NO: 32455 - DNA, 20 bp, Artificial Sequence
  chemically synthesized
cagtctcccacagcgctccc

SEQ ID NO: 32456 - DNA, 20 bp, Artificial Sequence
  chemically synthesized
cacagcgctcccaggcttat

SEQ ID NO: 32457 - DNA, 20 bp, Artificial Sequence
  chemically synthesized
acagcgctcccaggcttatt

SEQ ID NO: 32458 - DNA, 20 bp, Artificial Sequence
  chemically synthesized
gcgctcccaggcttattagg

SEQ ID NO: 32459 - DNA, 20 bp, Artificial Sequence
  chemically synthesized
gctcccaggcttattaggaa

SEQ ID NO: 32460 - DNA, 20 bp, Artificial Sequence
  chemically synthesized
ctcccaggcttattaggaag

SEQ ID NO: 32461 - DNA, 20 bp, Artificial Sequence
  chemically synthesized
aattcccgcctaataaattt

SEQ ID NO: 32462 - DNA, 20 bp, Artificial Sequence
  chemically synthesized
cccgcctaataaattttggt

SEQ ID NO: 32463 - DNA, 20 bp, Artificial Sequence
  chemically synthesized
ctaataaattttggtcagac

SEQ ID NO: 32464 - DNA, 20 bp, Artificial Sequence
  chemically synthesized
taaaaaccctgtctcctgat

SEQ ID NO: 32465 - DNA, 20 bp, Artificial Sequence
  chemically synthesized
taagatgttatcaatgacaa

SEQ ID NO: 32466 - DNA, 20 bp, Artificial Sequence
  chemically synthesized
aatggtgcccgaaacttcat

SEQ ID NO: 32467 - DNA, 20 bp, Artificial Sequence
  chemically synthesized
tagcaattttaatttcgcct

SEQ ID NO: 32468 - DNA, 20 bp, Artificial Sequence
  chemically synthesized
ttaatttcgcctcggtcctg

SEQ ID NO: 32469 - DNA, 20 bp, Artificial Sequence
  chemically synthesized
tgatattctattaccttgta

SEQ ID NO: 32470 - DNA, 20 bp, Artificial Sequence
  chemically synthesized
aatccctaatacaaacttgc

SEQ ID NO: 32471 - DNA, 20 bp, Artificial Sequence
  chemically synthesized
tacaaacttgctggtttttg

SEQ ID NO: 32472 - DNA, 20 bp, Artificial Sequence
  chemically synthesized
ttgctggtttttgtggcttg

SEQ ID NO: 32473 - DNA, 20 bp, Artificial Sequence
  chemically synthesized
tgctggtttttgtggcttgt

SEQ ID NO: 32474 - DNA, 20 bp, Artificial Sequence
  chemically synthesized
gctggtttttgtggcttgtg

SEQ ID NO: 32475 - DNA, 20 bp, Artificial Sequence
  chemically synthesized
ttgtggcttgtggggcatca

SEQ ID NO: 32476 - DNA, 20 bp, Artificial Sequence
  chemically synthesized
ccgaaatgtgatgcctcccc

SEQ ID NO: 32477 - DNA, 20 bp, Artificial Sequence
  chemically synthesized
tgatgcctcccccggatgcc

SEQ ID NO: 32478 - DNA, 20 bp, Artificial Sequence
  chemically synthesized
actctgtccctttatttcta

SEQ ID NO: 32479 - DNA, 20 bp, Artificial Sequence
  chemically synthesized
tgtccctttatttctaaagt

SEQ ID NO: 32480 - DNA, 20 bp, Artificial Sequence
  chemically synthesized
ttctaaagttggccgacgct

SEQ ID NO: 32481 - DNA, 20 bp, Artificial Sequence
  chemically synthesized
tctaaagttggccgacgctt

SEQ ID NO: 32482 - DNA, 20 bp, Artificial Sequence
  chemically synthesized
ctaaagttggccgacgctta

SEQ ID NO: 32483 - DNA, 20 bp, Artificial Sequence
  chemically synthesized
tggccgacgcttagggaaaa

SEQ ID NO: 32484 - DNA, 20 bp, Artificial Sequence
  chemically synthesized
gacgcttagggaaaatagaa

SEQ ID NO: 32485 - DNA, 20 bp, Artificial Sequence
  chemically synthesized
aaaagaacctacgtgaatat

SEQ ID NO: 32486 - DNA, 20 bp, Artificial Sequence
  chemically synthesized
aaagaacctacgtgaatatt

SEQ ID NO: 32487 - DNA, 20 bp, Artificial Sequence
  chemically synthesized
aagaacctacgtgaatattg

SEQ ID NO: 32488 - DNA, 20 bp, Artificial Sequence
  chemically synthesized
aacctacgtgaatattgggg

SEQ ID NO: 32489 - DNA, 20 bp, Artificial Sequence
  chemically synthesized
acctacgtgaatattggggc

SEQ ID NO: 32490 - DNA, 20 bp, Artificial Sequence
  chemically synthesized
ggggcaggttccctgatact

SEQ ID NO: 32491 - DNA, 20 bp, Artificial Sequence
  chemically synthesized
gcaggttccctgatactcag

SEQ ID NO: 32492 - DNA, 20 bp, Artificial Sequence
  chemically synthesized
ttccctgatactcagtggcg

SEQ ID NO: 32493 - DNA, 20 bp, Artificial Sequence
  chemically synthesized
ccctgatactcagtggcgtg

SEQ ID NO: 32494 - DNA, 20 bp, Artificial Sequence
  chemically synthesized
cagtggcgtggagatgtaac

SEQ ID NO: 32495 - DNA, 20 bp, Artificial Sequence
  chemically synthesized
gcgtggagatgtaacaagcc

SEQ ID NO: 32496 - DNA, 20 bp, Artificial Sequence
  chemically synthesized
tgtaacaagcctggatgtgt

SEQ ID NO: 32497 - DNA, 20 bp, Artificial Sequence
  chemically synthesized
ctggatgtgtgagtgatgat

SEQ ID NO: 32498 - DNA, 20 bp, Artificial Sequence
  chemically synthesized
tggatgtgtgagtgatgatc

SEQ ID NO: 32499 - DNA, 20 bp, Artificial Sequence
  chemically synthesized
agtgatgatcaggccaacaa

SEQ ID NO: 32500 - DNA, 20 bp, Artificial Sequence
  chemically synthesized
ggccaacaacagtctgtatt

SEQ ID NO: 32501 - DNA, 20 bp, Artificial Sequence
  chemically synthesized
caacaacagtctgtatttgg

SEQ ID NO: 32502 - DNA, 20 bp, Artificial Sequence
  chemically synthesized
tctgtatttggaagaaatat

SEQ ID NO: 32503 - DNA, 20 bp, Artificial Sequence
  chemically synthesized
cagatgtgaatgttatgacc

SEQ ID NO: 32504 - DNA, 20 bp, Artificial Sequence
  chemically synthesized
agatgtgaatgttatgacct

SEQ ID NO: 32505 - DNA, 20 bp, Artificial Sequence
  chemically synthesized
tgtgaatgttatgacctagg

SEQ ID NO: 32506 - DNA, 20 bp, Artificial Sequence
  chemically synthesized
tgttatgacctaggaagcaa

SEQ ID NO: 32507 - DNA, 20 bp, Artificial Sequence
  chemically synthesized
tatgacctaggaagcaatgg

SEQ ID NO: 32508 - DNA, 20 bp, Artificial Sequence
  chemically synthesized
aaaattattctttttgcctt

SEQ ID NO: 32509 - DNA, 20 bp, Artificial Sequence
  chemically synthesized
ttgtcaacacaaaaaatact

SEQ ID NO: 32510 - DNA, 20 bp, Artificial Sequence
  chemically synthesized
gttgtatactgatttgttaa

SEQ ID NO: 32511 - DNA, 20 bp, Artificial Sequence
  chemically synthesized
gtatactgatttgttaaaag

SEQ ID NO: 32512 - DNA, 20 bp, Artificial Sequence
  chemically synthesized
tactgatttgttaaaagcag

SEQ ID NO: 32513 - DNA, 20 bp, Artificial Sequence
  chemically synthesized
ttgttaaaagcagcagcatg

SEQ ID NO: 32514 - DNA, 20 bp, Artificial Sequence
  chemically synthesized
taaaagcagcagcatgcagt

SEQ ID NO: 32515 - DNA, 20 bp, Artificial Sequence
  chemically synthesized
aaaagcagcagcatgcagtt

SEQ ID NO: 32516 - DNA, 20 bp, Artificial Sequence
  chemically synthesized
tgcagttaggatgatatctt

SEQ ID NO: 32517 - DNA, 20 bp, Artificial Sequence
  chemically synthesized
gcagttaggatgatatcttt

SEQ ID NO: 32518 - DNA, 20 bp, Artificial Sequence
  chemically synthesized
cagttaggatgatatctttg

SEQ ID NO: 32519 - DNA, 20 bp, Artificial Sequence
  chemically synthesized
ggatgatatctttggggaaa

SEQ ID NO: 32520 - DNA, 20 bp, Artificial Sequence
  chemically synthesized
tgatatctttggggaaatgg

SEQ ID NO: 32521 - DNA, 20 bp, Artificial Sequence
  chemically synthesized
atatctttggggaaatggca

SEQ ID NO: 32522 - DNA, 20 bp, Artificial Sequence
  chemically synthesized
aaccccatgctcaccatcaa

SEQ ID NO: 32523 - DNA, 20 bp, Artificial Sequence
  chemically synthesized
accccatgctcaccatcaac

SEQ ID NO: 32524 - DNA, 20 bp, Artificial Sequence
  chemically synthesized
ccatcaacgggattgaattt

SEQ ID NO: 32525 - DNA, 20 bp, Artificial Sequence
  chemically synthesized
gggattgaatttgagctgct

SEQ ID NO: 32526 - DNA, 20 bp, Artificial Sequence
  chemically synthesized
gaatttgagctgctgagaat

SEQ ID NO: 32527 - DNA, 20 bp, Artificial Sequence
  chemically synthesized
ttatcttcaattctgtgaaa

SEQ ID NO: 32528 - DNA, 20 bp, Artificial Sequence
  chemically synthesized
aattctgtgaaatggaattt

SEQ ID NO: 32529 - DNA, 20 bp, Artificial Sequence
  chemically synthesized
tgtgaaatggaattttagac

SEQ ID NO: 32530 - DNA, 20 bp, Artificial Sequence
  chemically synthesized
tttagaccagcctgtgactg

SEQ ID NO: 32531 - DNA, 20 bp, Artificial Sequence
  chemically synthesized
cagcctgtgactgaagccac

SEQ ID NO: 32532 - DNA, 20 bp, Artificial Sequence
  chemically synthesized
agcctgtgactgaagccact

SEQ ID NO: 32533 - DNA, 20 bp, Artificial Sequence
  chemically synthesized
actgaagccactgggcatta

SEQ ID NO: 32534 - DNA, 20 bp, Artificial Sequence
  chemically synthesized
gccgcattgtttctctctgc

SEQ ID NO: 32535 - DNA, 20 bp, Artificial Sequence
  chemically synthesized
cgcattgtttctctctgcaa

SEQ ID NO: 32536 - DNA, 20 bp, Artificial Sequence
  chemically synthesized
cattgtttctctctgcaaga

SEQ ID NO: 32537 - DNA, 20 bp, Artificial Sequence
  chemically synthesized
attgtttctctctgcaagag

SEQ ID NO: 32538 - DNA, 20 bp, Artificial Sequence
  chemically synthesized
gtttctctctgcaagagagg

SEQ ID NO: 32539 - DNA, 20 bp, Artificial Sequence
  chemically synthesized
tttctctctgcaagagagga

SEQ ID NO: 32540 - DNA, 20 bp, Artificial Sequence
  chemically synthesized
ctctctgcaagagaggaagg

SEQ ID NO: 32541 - DNA, 20 bp, Artificial Sequence
  chemically synthesized
tctctgcaagagaggaagga

SEQ ID NO: 32542 - DNA, 20 bp, Artificial Sequence
  chemically synthesized
tgcaagagaggaaggaaggc

SEQ ID NO: 32543 - DNA, 20 bp, Artificial Sequence
  chemically synthesized
caagagaggaaggaaggctg

SEQ ID NO: 32544 - DNA, 20 bp, Artificial Sequence
  chemically synthesized
gaggaaggaaggctggagta

SEQ ID NO: 32545 - DNA, 20 bp, Artificial Sequence
  chemically synthesized
aggaaggctggagtacagct

SEQ ID NO: 32546 - DNA, 20 bp, Artificial Sequence
  chemically synthesized
tggagtacagctgagctttc

SEQ ID NO: 32547 - DNA, 20 bp, Artificial Sequence
  chemically synthesized
agtacagctgagctttctgg

SEQ ID NO: 32548 - DNA, 20 bp, Artificial Sequence
  chemically synthesized
gtacagctgagctttctggc

SEQ ID NO: 32549 - DNA, 20 bp, Artificial Sequence
  chemically synthesized
ctgagctttctggcaggcac

SEQ ID NO: 32550 - DNA, 20 bp, Artificial Sequence
  chemically synthesized
agctttctggcaggcactgg

SEQ ID NO: 32551 - DNA, 20 bp, Artificial Sequence
  chemically synthesized
ctttctggcaggcactggtg

SEQ ID NO: 32552 - DNA, 20 bp, Artificial Sequence
  chemically synthesized
ccttccccattctttgtaac

SEQ ID NO: 32553 - DNA, 20 bp, Artificial Sequence
  chemically synthesized
tccccattctttgtaactgg

SEQ ID NO: 32554 - DNA, 20 bp, Artificial Sequence
  chemically synthesized
ttctttgtaactggtggcct

SEQ ID NO: 32555 - DNA, 20 bp, Artificial Sequence
  chemically synthesized
tttgtaactggtggccttag

SEQ ID NO: 32556 - DNA, 20 bp, Artificial Sequence
  chemically synthesized
tgtaactggtggccttagaa

SEQ ID NO: 32557 - DNA, 20 bp, Artificial Sequence
  chemically synthesized
gtaactggtggccttagaag

SEQ ID NO: 32558 - DNA, 20 bp, Artificial Sequence
  chemically synthesized
taactggtggccttagaaga

SEQ ID NO: 32559 - DNA, 20 bp, Artificial Sequence
  chemically synthesized
ggtggccttagaagagggtt

SEQ ID NO: 32560 - DNA, 20 bp, Artificial Sequence
  chemically synthesized
gtggccttagaagagggttc

SEQ ID NO: 32561 - DNA, 20 bp, Artificial Sequence
  chemically synthesized
tggccttagaagagggttca

SEQ ID NO: 32562 - DNA, 20 bp, Artificial Sequence
  chemically synthesized
agggttcagggttatgtgtt

SEQ ID NO: 32563 - DNA, 20 bp, Artificial Sequence
  chemically synthesized
gggttatgtgtttggaacac

SEQ ID NO: 32564 - DNA, 20 bp, Artificial Sequence
  chemically synthesized
tatgtgtttggaacacgagt

SEQ ID NO: 32565 - DNA, 20 bp, Artificial Sequence
  chemically synthesized
ggaacacgagttagtataaa

SEQ ID NO: 32566 - DNA, 20 bp, Artificial Sequence
  chemically synthesized
agttagtataaatggttctg

SEQ ID NO: 32567 - DNA, 20 bp, Artificial Sequence
  chemically synthesized
tggttctgaagcacttgatt

SEQ ID NO: 32568 - DNA, 20 bp, Artificial Sequence
  chemically synthesized
tcagactgtgctttaaaaaa

SEQ ID NO: 32569 - DNA, 20 bp, Artificial Sequence
  chemically synthesized
cagactgtgctttaaaaaat

SEQ ID NO: 32570 - DNA, 20 bp, Artificial Sequence
  chemically synthesized
ctgtgctttaaaaaatagga

SEQ ID NO: 32571 - DNA, 20 bp, Artificial Sequence
  chemically synthesized
gctttaaaaaataggaaaga

SEQ ID NO: 32572 - DNA, 20 bp, Artificial Sequence
  chemically synthesized
ttaaaaaataggaaagaaag

SEQ ID NO: 32573 - DNA, 20 bp, Artificial Sequence
  chemically synthesized
aaaataggaaagaaagtaga

SEQ ID NO: 32574 - DNA, 20 bp, Artificial Sequence
  chemically synthesized
aggaaagaaagtagaaagaa

SEQ ID NO: 32575 - DNA, 20 bp, Artificial Sequence
  chemically synthesized
aaagtagaaagaacagctga

SEQ ID NO: 32576 - DNA, 20 bp, Artificial Sequence
  chemically synthesized
agaaagaacagctgatggtt

SEQ ID NO: 32577 - DNA, 20 bp, Artificial Sequence
  chemically synthesized
aagaacagctgatggtttgg

SEQ ID NO: 32578 - DNA, 20 bp, Artificial Sequence
  chemically synthesized
agaacagctgatggtttgga

SEQ ID NO: 32579 - DNA, 20 bp, Artificial Sequence
  chemically synthesized
gaacagctgatggtttggaa

SEQ ID NO: 32580 - DNA, 20 bp, Artificial Sequence
  chemically synthesized
acagctgatggtttggaagg

SEQ ID NO: 32581 - DNA, 20 bp, Artificial Sequence
  chemically synthesized
tggtttggaagggagccacc

SEQ ID NO: 32582 - DNA, 20 bp, Artificial Sequence
  chemically synthesized
gaagggagccaccaagcacc

SEQ ID NO: 32583 - DNA, 20 bp, Artificial Sequence
  chemically synthesized
agggagccaccaagcaccaa

SEQ ID NO: 32584 - DNA, 20 bp, Artificial Sequence
  chemically synthesized
gggagccaccaagcaccaag

SEQ ID NO: 32585 - DNA, 20 bp, Artificial Sequence
  chemically synthesized
caccaagcaccaagaggtgt

SEQ ID NO: 32586 - DNA, 20 bp, Artificial Sequence
  chemically synthesized
ctgaatccgtttctcaatct

SEQ ID NO: 32587 - DNA, 20 bp, Artificial Sequence
  chemically synthesized
ccgtttctcaatcttagctg

SEQ ID NO: 32588 - DNA, 20 bp, Artificial Sequence
  chemically synthesized
cgtttctcaatcttagctgc

SEQ ID NO: 32589 - DNA, 20 bp, Artificial Sequence
  chemically synthesized
gtttctcaatcttagctgca

SEQ ID NO: 32590 - DNA, 20 bp, Artificial Sequence
  chemically synthesized
caatcttagctgcagggcat

SEQ ID NO: 32591 - DNA, 20 bp, Artificial Sequence
  chemically synthesized
tagctgcagggcattggcta

SEQ ID NO: 32592 - DNA, 20 bp, Artificial Sequence
  chemically synthesized
gctgcagggcattggctaaa

SEQ ID NO: 32593 - DNA, 20 bp, Artificial Sequence
  chemically synthesized
ctgcagggcattggctaaag

SEQ ID NO: 32594 - DNA, 20 bp, Artificial Sequence
  chemically synthesized
cagggcattggctaaagagg

SEQ ID NO: 32595 - DNA, 20 bp, Artificial Sequence
  chemically synthesized
agggcattggctaaagagga

SEQ ID NO: 32596 - DNA, 20 bp, Artificial Sequence
  chemically synthesized
agaggaaggtgaaaactgct

SEQ ID NO: 32597 - DNA, 20 bp, Artificial Sequence
  chemically synthesized
tgagtcactatcaaatcaat

SEQ ID NO: 32598 - DNA, 20 bp, Artificial Sequence
  chemically synthesized
attggtttttctaatcccct

SEQ ID NO: 32599 - DNA, 20 bp, Artificial Sequence
  chemically synthesized
tggtttttctaatcccctga

SEQ ID NO: 32600 - DNA, 20 bp, Artificial Sequence
  chemically synthesized
ttctaatcccctgagagaaa

SEQ ID NO: 32601 - DNA, 20 bp, Artificial Sequence
  chemically synthesized
atcccctgagagaaaaagta

SEQ ID NO: 32602 - DNA, 20 bp, Artificial Sequence
  chemically synthesized
cccctgagagaaaaagtaca

SEQ ID NO: 32603 - DNA, 20 bp, Artificial Sequence
  chemically synthesized
aaaaagtacagagtttattg

SEQ ID NO: 32604 - DNA, 20 bp, Artificial Sequence
  chemically synthesized
ttaaaatgccatgcccctca

SEQ ID NO: 32605 - DNA, 20 bp, Artificial Sequence
  chemically synthesized
tgccatgcccctcacggcca

SEQ ID NO: 32606 - DNA, 20 bp, Artificial Sequence
  chemically synthesized
gccatgcccctcacggccaa

SEQ ID NO: 32607 - DNA, 20 bp, Artificial Sequence
  chemically synthesized
cggccaaaggcatctgaatt

SEQ ID NO: 32608 - DNA, 20 bp, Artificial Sequence
  chemically synthesized
ggccaaaggcatctgaatta

SEQ ID NO: 32609 - DNA, 20 bp, Artificial Sequence
  chemically synthesized
caaaggcatctgaattaagg

SEQ ID NO: 32610 - DNA, 20 bp, Artificial Sequence
  chemically synthesized
aggcatctgaattaaggaag

SEQ ID NO: 32611 - DNA, 20 bp, Artificial Sequence
  chemically synthesized
aattaaggaagcagtattca

SEQ ID NO: 32612 - DNA, 20 bp, Artificial Sequence
  chemically synthesized
gtattcacagctgctttctc

SEQ ID NO: 32613 - DNA, 20 bp, Artificial Sequence
  chemically synthesized
agctgctttctccagacatt

SEQ ID NO: 32614 - DNA, 20 bp, Artificial Sequence
  chemically synthesized
tttctccagacattgagctc

SEQ ID NO: 32615 - DNA, 20 bp, Artificial Sequence
  chemically synthesized
ttctccagacattgagctca

SEQ ID NO: 32616 - DNA, 20 bp, Artificial Sequence
  chemically synthesized
ccagacattgagctcaagga

SEQ ID NO: 32617 - DNA, 20 bp, Artificial Sequence
  chemically synthesized
aatctgaactctgcttttat

SEQ ID NO: 32618 - DNA, 20 bp, Artificial Sequence
  chemically synthesized
tttatcagctgcgaaaatcc

SEQ ID NO: 32619 - DNA, 20 bp, Artificial Sequence
  chemically synthesized
aaaatccaagcattcatttc

SEQ ID NO: 32620 - DNA, 20 bp, Artificial Sequence
  chemically synthesized
tccaagcattcatttccagc

SEQ ID NO: 32621 - DNA, 20 bp, Artificial Sequence
  chemically synthesized
gcattcatttccagctggtt

SEQ ID NO: 32622 - DNA, 20 bp, Artificial Sequence
  chemically synthesized
ctggttcagtgcctatgtaa

SEQ ID NO: 32623 - DNA, 20 bp, Artificial Sequence
  chemically synthesized
agtatactgtgtacaaaaat

SEQ ID NO: 32624 - DNA, 20 bp, Artificial Sequence
  chemically synthesized
tgtacaaaaataagattaaa

SEQ ID NO: 32625 - DNA, 20 bp, Artificial Sequence
  chemically synthesized
aagattaaaaagctaacatt

SEQ ID NO: 32626 - DNA, 20 bp, Artificial Sequence
  chemically synthesized
ttaaaaagctaacattaagc

SEQ ID NO: 32627 - DNA, 20 bp, Artificial Sequence
  chemically synthesized
gtgtgtttgtatgttttcta

SEQ ID NO: 32628 - DNA, 20 bp, Artificial Sequence
  chemically synthesized
tttgtatgttttctacagtt

SEQ ID NO: 32629 - DNA, 20 bp, Artificial Sequence
  chemically synthesized
ttctgaataatttgatccga

SEQ ID NO: 32630 - DNA, 20 bp, Artificial Sequence
  chemically synthesized
atatgatttcatttcttttc

SEQ ID NO: 32631 - DNA, 20 bp, Artificial Sequence
  chemically synthesized
atgatttcatttcttttcga

SEQ ID NO: 32632 - DNA, 20 bp, Artificial Sequence
  chemically synthesized
tatgcatactttctaaatgc

SEQ ID NO: 32633 - DNA, 20 bp, Artificial Sequence
  chemically synthesized
aaatgcaagaataaattcct

SEQ ID NO: 32634 - DNA, 20 bp, Artificial Sequence
  chemically synthesized
tcctgagctccatgtgactt

SEQ ID NO: 32635 - DNA, 20 bp, Artificial Sequence
  chemically synthesized
ccatgtgacttcagtaccat

SEQ ID NO: 32636 - DNA, 20 bp, Artificial Sequence
  chemically synthesized
cttcagtaccatcagctctt

SEQ ID NO: 32637 - DNA, 20 bp, Artificial Sequence
  chemically synthesized
cagtaccatcagctctttgg

SEQ ID NO: 32638 - DNA, 20 bp, Artificial Sequence
  chemically synthesized
tcagctctttggcagcttat

SEQ ID NO: 32639 - DNA, 20 bp, Artificial Sequence
  chemically synthesized
tttggcagcttatgagtata

SEQ ID NO: 32640 - DNA, 20 bp, Artificial Sequence
  chemically synthesized
acagctttttaattctcacc

SEQ ID NO: 32641 - DNA, 20 bp, Artificial Sequence
  chemically synthesized
tttaattctcacctggtccc

SEQ ID NO: 32642 - DNA, 20 bp, Artificial Sequence
  chemically synthesized
ttaattctcacctggtcccc

SEQ ID NO: 32643 - DNA, 20 bp, Artificial Sequence
  chemically synthesized
ctcacctggtccccaggata

SEQ ID NO: 32644 - DNA, 20 bp, Artificial Sequence
  chemically synthesized
ccaggatatggtttacttgt

SEQ ID NO: 32645 - DNA, 20 bp, Artificial Sequence
  chemically synthesized
aggatatggtttacttgtca

SEQ ID NO: 32646 - DNA, 20 bp, Artificial Sequence
  chemically synthesized
atatggtttacttgtcagag

SEQ ID NO: 32647 - DNA, 20 bp, Artificial Sequence
  chemically synthesized
acttgtcagagtagttttat

SEQ ID NO: 32648 - DNA, 20 bp, Artificial Sequence
  chemically synthesized
cttgtcagagtagttttatg

SEQ ID NO: 32649 - DNA, 20 bp, Artificial Sequence
  chemically synthesized
ctttctcctgactctgattc

SEQ ID NO: 32650 - DNA, 20 bp, Artificial Sequence
  chemically synthesized
tttctcctgactctgattct

SEQ ID NO: 32651 - DNA, 20 bp, Artificial Sequence
  chemically synthesized
gattctaggtaacacctgat

SEQ ID NO: 32652 - DNA, 20 bp, Artificial Sequence
  chemically synthesized
gtaacacctgatgagatgaa

SEQ ID NO: 32653 - DNA, 20 bp, Artificial Sequence
  chemically synthesized
cacctgatgagatgaacaga

SEQ ID NO: 32654 - DNA, 20 bp, Artificial Sequence
  chemically synthesized
tgcacctcacttcctcttac

SEQ ID NO: 32655 - DNA, 20 bp, Artificial Sequence
  chemically synthesized
gcacctcacttcctcttact

SEQ ID NO: 32656 - DNA, 20 bp, Artificial Sequence
  chemically synthesized
acttcctcttactgggcatg

SEQ ID NO: 32657 - DNA, 20 bp, Artificial Sequence
  chemically synthesized
cttcctcttactgggcatga

SEQ ID NO: 32658 - DNA, 20 bp, Artificial Sequence
  chemically synthesized
ctcttactgggcatgaagga

SEQ ID NO: 32659 - DNA, 20 bp, Artificial Sequence
  chemically synthesized
cttactgggcatgaaggaaa

SEQ ID NO: 32660 - DNA, 20 bp, Artificial Sequence
  chemically synthesized
tactgggcatgaaggaaaga

SEQ ID NO: 32661 - DNA, 20 bp, Artificial Sequence
  chemically synthesized
ctgggcatgaaggaaagaga

SEQ ID NO: 32662 - DNA, 20 bp, Artificial Sequence
  chemically synthesized
ggcatgaaggaaagagagag

SEQ ID NO: 32663 - DNA, 20 bp, Artificial Sequence
  chemically synthesized
tgaaggaaagagagagaagt

SEQ ID NO: 32664 - DNA, 20 bp, Artificial Sequence
  chemically synthesized
gaaggaaagagagagaagtc

SEQ ID NO: 32665 - DNA, 20 bp, Artificial Sequence
  chemically synthesized
aaggaaagagagagaagtca

SEQ ID NO: 32666 - DNA, 20 bp, Artificial Sequence
  chemically synthesized
gaaagagagagaagtcaggg

SEQ ID NO: 32667 - DNA, 20 bp, Artificial Sequence
  chemically synthesized
aagagagagaagtcagggta

SEQ ID NO: 32668 - DNA, 20 bp, Artificial Sequence
  chemically synthesized
tgctacattttttttttctg

SEQ ID NO: 32669 - DNA, 20 bp, Artificial Sequence
  chemically synthesized
attttttttttctgtggaaa

SEQ ID NO: 32670 - DNA, 20 bp, Artificial Sequence
  chemically synthesized
tttttttttctgtggaaaaa

SEQ ID NO: 32671 - DNA, 20 bp, Artificial Sequence
  chemically synthesized
atatttctaattaaccttga

SEQ ID NO: 32672 - DNA, 20 bp, Artificial Sequence
  chemically synthesized
tatttctaattaaccttgat

SEQ ID NO: 32673 - DNA, 20 bp, Artificial Sequence
  chemically synthesized
aattaaccttgatgggaaca

SEQ ID NO: 32674 - DNA, 20 bp, Artificial Sequence
  chemically synthesized
cttgatgggaacatagaaca

SEQ ID NO: 32675 - DNA, 20 bp, Artificial Sequence
  chemically synthesized
aacatagaacatagattgta

SEQ ID NO: 32676 - DNA, 20 bp, Artificial Sequence
  chemically synthesized
acatagaacatagattgtaa

SEQ ID NO: 32677 - DNA, 20 bp, Artificial Sequence
  chemically synthesized
catagaacatagattgtaaa

SEQ ID NO: 32678 - DNA, 20 bp, Artificial Sequence
  chemically synthesized
agggaacttgcacattatcg

SEQ ID NO: 32679 - DNA, 20 bp, Artificial Sequence
  chemically synthesized
gaacttgcacattatcgcag

SEQ ID NO: 32680 - DNA, 20 bp, Artificial Sequence
  chemically synthesized
aacttgcacattatcgcagt

SEQ ID NO: 32681 - DNA, 20 bp, Artificial Sequence
  chemically synthesized
tatcgcagtaggctgaataa

SEQ ID NO: 32682 - DNA, 20 bp, Artificial Sequence
  chemically synthesized
gtaggctgaataatggctaa

SEQ ID NO: 32683 - DNA, 20 bp, Artificial Sequence
  chemically synthesized
tggctaatggctcactctga

SEQ ID NO: 32684 - DNA, 20 bp, Artificial Sequence
  chemically synthesized
ctcactctgaaagatatgta

SEQ ID NO: 32685 - DNA, 20 bp, Artificial Sequence
  chemically synthesized
gcttaacccctgaaacctgt

SEQ ID NO: 32686 - DNA, 20 bp, Artificial Sequence
  chemically synthesized
cctgtgagtattatcttttc

SEQ ID NO: 32687 - DNA, 20 bp, Artificial Sequence
  chemically synthesized
tattatcttttctagccaaa

SEQ ID NO: 32688 - DNA, 20 bp, Artificial Sequence
  chemically synthesized
agacttttgcatatataatt

SEQ ID NO: 32689 - DNA, 20 bp, Artificial Sequence
  chemically synthesized
gacttttgcatatataatta

SEQ ID NO: 32690 - DNA, 20 bp, Artificial Sequence
  chemically synthesized
gcatatataattaaggatct

SEQ ID NO: 32691 - DNA, 20 bp, Artificial Sequence
  chemically synthesized
catatataattaaggatctt

SEQ ID NO: 32692 - DNA, 20 bp, Artificial Sequence
  chemically synthesized
tataattaaggatcttggga

SEQ ID NO: 32693 - DNA, 20 bp, Artificial Sequence
  chemically synthesized
ataattaaggatcttgggat

SEQ ID NO: 32694 - DNA, 20 bp, Artificial Sequence
  chemically synthesized
taattaaggatcttgggatg

SEQ ID NO: 32695 - DNA, 20 bp, Artificial Sequence
  chemically synthesized
attaaggatcttgggatggg

SEQ ID NO: 32696 - DNA, 20 bp, Artificial Sequence
  chemically synthesized
ggggagatatcctaattatt

SEQ ID NO: 32697 - DNA, 20 bp, Artificial Sequence
  chemically synthesized
gggagatatcctaattattt

SEQ ID NO: 32698 - DNA, 20 bp, Artificial Sequence
  chemically synthesized
tgtatcctaaatgtaatcac

SEQ ID NO: 32699 - DNA, 20 bp, Artificial Sequence
  chemically synthesized
gtaatcacaagtgtcattat

SEQ ID NO: 32700 - DNA, 20 bp, Artificial Sequence
  chemically synthesized
aatcacaagtgtcattataa

SEQ ID NO: 32701 - DNA, 20 bp, Artificial Sequence
  chemically synthesized
atcacaagtgtcattataag

SEQ ID NO: 32702 - DNA, 20 bp, Artificial Sequence
  chemically synthesized
tcacaagtgtcattataaga

SEQ ID NO: 32703 - DNA, 20 bp, Artificial Sequence
  chemically synthesized
acaagtgtcattataagagg

SEQ ID NO: 32704 - DNA, 20 bp, Artificial Sequence
  chemically synthesized
caagtgtcattataagaggg

SEQ ID NO: 32705 - DNA, 20 bp, Artificial Sequence
  chemically synthesized
gtcattataagagggaggca

SEQ ID NO: 32706 - DNA, 20 bp, Artificial Sequence
  chemically synthesized
tcattataagagggaggcaa

SEQ ID NO: 32707 - DNA, 20 bp, Artificial Sequence
  chemically synthesized
cattataagagggaggcaaa

SEQ ID NO: 32708 - DNA, 20 bp, Artificial Sequence
  chemically synthesized
ttataagagggaggcaaagg

SEQ ID NO: 32709 - DNA, 20 bp, Artificial Sequence
  chemically synthesized
caaagggagatttgacttat

SEQ ID NO: 32710 - DNA, 20 bp, Artificial Sequence
  chemically synthesized
aagggagatttgacttataa

SEQ ID NO: 32711 - DNA, 20 bp, Artificial Sequence
  chemically synthesized
agggagatttgacttataag

SEQ ID NO: 32712 - DNA, 20 bp, Artificial Sequence
  chemically synthesized
ggagatttgacttataagag

SEQ ID NO: 32713 - DNA, 20 bp, Artificial Sequence
  chemically synthesized
aaaatgtgacgtgattacaa

SEQ ID NO: 32714 - DNA, 20 bp, Artificial Sequence
  chemically synthesized
atgtgacgtgattacaaaag

SEQ ID NO: 32715 - DNA, 20 bp, Artificial Sequence
  chemically synthesized
gtgacgtgattacaaaagca

SEQ ID NO: 32716 - DNA, 20 bp, Artificial Sequence
  chemically synthesized
agcagagatacatttttttg

SEQ ID NO: 32717 - DNA, 20 bp, Artificial Sequence
  chemically synthesized
gatacatttttttgaagatc

SEQ ID NO: 32718 - DNA, 20 bp, Artificial Sequence
  chemically synthesized
atacatttttttgaagatcg

SEQ ID NO: 32719 - DNA, 20 bp, Artificial Sequence
  chemically synthesized
catttttttgaagatcgagg

SEQ ID NO: 32720 - DNA, 20 bp, Artificial Sequence
  chemically synthesized
tttttttgaagatcgaggaa

SEQ ID NO: 32721 - DNA, 20 bp, Artificial Sequence
  chemically synthesized
ttttttgaagatcgaggaag

SEQ ID NO: 32722 - DNA, 20 bp, Artificial Sequence
  chemically synthesized
cgaggaagaggctacaaacc

SEQ ID NO: 32723 - DNA, 20 bp, Artificial Sequence
  chemically synthesized
gaggaagaggctacaaacca

SEQ ID NO: 32724 - DNA, 20 bp, Artificial Sequence
  chemically synthesized
aggctacaaaccaaggaatg

SEQ ID NO: 32725 - DNA, 20 bp, Artificial Sequence
  chemically synthesized
ggctacaaaccaaggaatgt

SEQ ID NO: 32726 - DNA, 20 bp, Artificial Sequence
  chemically synthesized
tacaaaccaaggaatgtggg

SEQ ID NO: 32727 - DNA, 20 bp, Artificial Sequence
  chemically synthesized
caaggaatgtgggtagcctc

SEQ ID NO: 32728 - DNA, 20 bp, Artificial Sequence
  chemically synthesized
ggaatgtgggtagcctctag

SEQ ID NO: 32729 - DNA, 20 bp, Artificial Sequence
  chemically synthesized
aatgtgggtagcctctagaa

SEQ ID NO: 32730 - DNA, 20 bp, Artificial Sequence
  chemically synthesized
atgtgggtagcctctagaag

SEQ ID NO: 32731 - DNA, 20 bp, Artificial Sequence
  chemically synthesized
gtagcctctagaagaggaaa

SEQ ID NO: 32732 - DNA, 20 bp, Artificial Sequence
  chemically synthesized
agaagaggaaacagaatcca

SEQ ID NO: 32733 - DNA, 20 bp, Artificial Sequence
  chemically synthesized
aggaaacagaatccatggaa

SEQ ID NO: 32734 - DNA, 20 bp, Artificial Sequence
  chemically synthesized
ggaaacagaatccatggaaa

SEQ ID NO: 32735 - DNA, 20 bp, Artificial Sequence
  chemically synthesized
aacagaatccatggaaaagg

SEQ ID NO: 32736 - DNA, 20 bp, Artificial Sequence
  chemically synthesized
acagaatccatggaaaaggc

SEQ ID NO: 32737 - DNA, 20 bp, Artificial Sequence
  chemically synthesized
caggaaaacacaatctctca

SEQ ID NO: 32738 - DNA, 20 bp, Artificial Sequence
  chemically synthesized
ggaaaacacaatctctcata

SEQ ID NO: 32739 - DNA, 20 bp, Artificial Sequence
  chemically synthesized
acaatctctcatagagtctc

SEQ ID NO: 32740 - DNA, 20 bp, Artificial Sequence
  chemically synthesized
atctctcatagagtctccag

SEQ ID NO: 32741 - DNA, 20 bp, Artificial Sequence
  chemically synthesized
catagagtctccagaagaaa

SEQ ID NO: 32742 - DNA, 20 bp, Artificial Sequence
  chemically synthesized
ccacactgacacctcgactt

SEQ ID NO: 32743 - DNA, 20 bp, Artificial Sequence
  chemically synthesized
ctgacacctcgactttagcc

SEQ ID NO: 32744 - DNA, 20 bp, Artificial Sequence
  chemically synthesized
tagcccagtgaaaccgattt

SEQ ID NO: 32745 - DNA, 20 bp, Artificial Sequence
  chemically synthesized
cttctgacctccacaacttc

SEQ ID NO: 32746 - DNA, 20 bp, Artificial Sequence
  chemically synthesized
taatacatttgtgttgtttt

SEQ ID NO: 32747 - DNA, 20 bp, Artificial Sequence
  chemically synthesized
gttttaagccaataaatttg

SEQ ID NO: 32748 - DNA, 20 bp, Artificial Sequence
  chemically synthesized
aaatttgtggtaatttttta

SEQ ID NO: 32749 - DNA, 20 bp, Artificial Sequence
  chemically synthesized
tttgtggtaattttttacag

SEQ ID NO: 32750 - DNA, 20 bp, Artificial Sequence
  chemically synthesized
tggtaattttttacagcagc

SEQ ID NO: 32751 - DNA, 20 bp, Artificial Sequence
  chemically synthesized
gtaattttttacagcagcaa

SEQ ID NO: 32752 - DNA, 20 bp, Artificial Sequence
  chemically synthesized
taattttttacagcagcaag

SEQ ID NO: 32753 - DNA, 20 bp, Artificial Sequence
  chemically synthesized
ttacagcagcaagaggaaat

SEQ ID NO: 32754 - DNA, 20 bp, Artificial Sequence
  chemically synthesized
gcaagaggaaatcagttacg

SEQ ID NO: 32755 - DNA, 20 bp, Artificial Sequence
  chemically synthesized
aggaaatcagttacgtagaa

SEQ ID NO: 32756 - DNA, 20 bp, Artificial Sequence
  chemically synthesized
aaatcagttacgtagaatag

SEQ ID NO: 32757 - DNA, 20 bp, Artificial Sequence
  chemically synthesized
aatcagttacgtagaatagt

SEQ ID NO: 32758 - DNA, 20 bp, Artificial Sequence
  chemically synthesized
agaatagtaggtcctgtctc

SEQ ID NO: 32759 - DNA, 20 bp, Artificial Sequence
  chemically synthesized
tcctgtctctggctaatcat

SEQ ID NO: 32760 - DNA, 20 bp, Artificial Sequence
  chemically synthesized
gctaatcattagaatcactc

SEQ ID NO: 32761 - DNA, 20 bp, Artificial Sequence
  chemically synthesized
aatcattagaatcactccag

SEQ ID NO: 32762 - DNA, 20 bp, Artificial Sequence
  chemically synthesized
ctccagaagcttgttacata

SEQ ID NO: 32763 - DNA, 20 bp, Artificial Sequence
  chemically synthesized
aagcttgttacatacagacc

SEQ ID NO: 32764 - DNA, 20 bp, Artificial Sequence
  chemically synthesized
gcttgttacatacagaccca

SEQ ID NO: 32765 - DNA, 20 bp, Artificial Sequence
  chemically synthesized
gttacatacagacccagagc

SEQ ID NO: 32766 - DNA, 20 bp, Artificial Sequence
  chemically synthesized
agacccagagccagtgaatc

SEQ ID NO: 32767 - DNA, 20 bp, Artificial Sequence
  chemically synthesized
gacccagagccagtgaatca

SEQ ID NO: 32768 - DNA, 20 bp, Artificial Sequence
  chemically synthesized
gagccagtgaatcaaggatt

SEQ ID NO: 32769 - DNA, 20 bp, Artificial Sequence
  chemically synthesized
ccagtgaatcaaggatttgg

SEQ ID NO: 32770 - DNA, 20 bp, Artificial Sequence
  chemically synthesized
gtgaatcaaggatttggtgg

SEQ ID NO: 32771 - DNA, 20 bp, Artificial Sequence
  chemically synthesized
tgaatcaaggatttggtggt

SEQ ID NO: 32772 - DNA, 20 bp, Artificial Sequence
  chemically synthesized
gaatcaaggatttggtggtg

SEQ ID NO: 32773 - DNA, 20 bp, Artificial Sequence
  chemically synthesized
aaggatttggtggtggggcc

SEQ ID NO: 32774 - DNA, 20 bp, Artificial Sequence
  chemically synthesized
ggatttggtggtggggccca

SEQ ID NO: 32775 - DNA, 20 bp, Artificial Sequence
  chemically synthesized
gggcccagagcctgaatatt

SEQ ID NO: 32776 - DNA, 20 bp, Artificial Sequence
  chemically synthesized
ccagagcctgaatattaagc

SEQ ID NO: 32777 - DNA, 20 bp, Artificial Sequence
  chemically synthesized
attaagcaagttcttcgttt

SEQ ID NO: 32778 - DNA, 20 bp, Artificial Sequence
  chemically synthesized
aagttcttcgttttagaaat

SEQ ID NO: 32779 - DNA, 20 bp, Artificial Sequence
  chemically synthesized
agttcttcgttttagaaatg

SEQ ID NO: 32780 - DNA, 20 bp, Artificial Sequence
  chemically synthesized
gttttagaaatgaggaaacc

SEQ ID NO: 32781 - DNA, 20 bp, Artificial Sequence
  chemically synthesized
ttttagaaatgaggaaacca

SEQ ID NO: 32782 - DNA, 20 bp, Artificial Sequence
  chemically synthesized
agaaatgaggaaaccaaggt

SEQ ID NO: 32783 - DNA, 20 bp, Artificial Sequence
  chemically synthesized
gaaatgaggaaaccaaggtt

SEQ ID NO: 32784 - DNA, 20 bp, Artificial Sequence
  chemically synthesized
aatgaggaaaccaaggttgg

SEQ ID NO: 32785 - DNA, 20 bp, Artificial Sequence
  chemically synthesized
gaggaaaccaaggttgggag

SEQ ID NO: 32786 - DNA, 20 bp, Artificial Sequence
  chemically synthesized
aaccaaggttgggagaagct

SEQ ID NO: 32787 - DNA, 20 bp, Artificial Sequence
  chemically synthesized
aagcaacttactcaaataca

SEQ ID NO: 32788 - DNA, 20 bp, Artificial Sequence
  chemically synthesized
agcaacttactcaaatacat

SEQ ID NO: 32789 - DNA, 20 bp, Artificial Sequence
  chemically synthesized
gcaacttactcaaatacata

SEQ ID NO: 32790 - DNA, 20 bp, Artificial Sequence
  chemically synthesized
tcttttgaattttcttaccc

SEQ ID NO: 32791 - DNA, 20 bp, Artificial Sequence
  chemically synthesized
tgtaaatgtgatttcattta

SEQ ID NO: 32792 - DNA, 20 bp, Artificial Sequence
  chemically synthesized
ttgacatattcattaaaatg

SEQ ID NO: 32793 - DNA, 20 bp, Artificial Sequence
  chemically synthesized
tcattaaaatgaagaaataa

SEQ ID NO: 32794 - DNA, 20 bp, Artificial Sequence
  chemically synthesized
aaaatgaagaaataaaagat

SEQ ID NO: 32795 - DNA, 20 bp, Artificial Sequence
  chemically synthesized
aagaaataaaagatgagaaa

SEQ ID NO: 32796 - DNA, 20 bp, Artificial Sequence
  chemically synthesized
attatataatgtttattgat

SEQ ID NO: 32797 - DNA, 20 bp, Artificial Sequence
  chemically synthesized
agaatgaatatgatgcaatc

SEQ ID NO: 32798 - DNA, 20 bp, Artificial Sequence
  chemically synthesized
gcaatctggttttctgtgtt

SEQ ID NO: 32799 - DNA, 20 bp, Artificial Sequence
  chemically synthesized
gtgttcagattcctgacctc

SEQ ID NO: 32800 - DNA, 20 bp, Artificial Sequence
  chemically synthesized
gttcagattcctgacctctg

SEQ ID NO: 32801 - DNA, 20 bp, Artificial Sequence
  chemically synthesized
ggagttaacctttctttgta

SEQ ID NO: 32802 - DNA, 20 bp, Artificial Sequence
  chemically synthesized
taacctttctttgtaaagat

SEQ ID NO: 32803 - DNA, 20 bp, Artificial Sequence
  chemically synthesized
ctttctttgtaaagattaga

SEQ ID NO: 32804 - DNA, 20 bp, Artificial Sequence
  chemically synthesized
tctttgtaaagattagacag

SEQ ID NO: 32805 - DNA, 20 bp, Artificial Sequence
  chemically synthesized
ctttgtaaagattagacagc

SEQ ID NO: 32806 - DNA, 20 bp, Artificial Sequence
  chemically synthesized
tgtaaagattagacagcagg

SEQ ID NO: 32807 - DNA, 20 bp, Artificial Sequence
  chemically synthesized
gtaaagattagacagcaggc

SEQ ID NO: 32808 - DNA, 20 bp, Artificial Sequence
  chemically synthesized
taaagattagacagcaggca

SEQ ID NO: 32809 - DNA, 20 bp, Artificial Sequence
  chemically synthesized
agattagacagcaggcaggg

SEQ ID NO: 32810 - DNA, 20 bp, Artificial Sequence
  chemically synthesized
ggaagaatgcctttgaaact

SEQ ID NO: 32811 - DNA, 20 bp, Artificial Sequence
  chemically synthesized
aagaatgcctttgaaactga

SEQ ID NO: 32812 - DNA, 20 bp, Artificial Sequence
  chemically synthesized
tgcctttgaaactgagagca

SEQ ID NO: 32813 - DNA, 20 bp, Artificial Sequence
  chemically synthesized
ttgaaactgagagcaaagac

SEQ ID NO: 32814 - DNA, 20 bp, Artificial Sequence
  chemically synthesized
tgcaatttacattgatgtcc

SEQ ID NO: 32815 - DNA, 20 bp, Artificial Sequence
  chemically synthesized
gtcctggtgctgtgcataat

SEQ ID NO: 32816 - DNA, 20 bp, Artificial Sequence
  chemically synthesized
aataagttgcttaaacatga

SEQ ID NO: 32817 - DNA, 20 bp, Artificial Sequence
  chemically synthesized
aagttgcttaaacatgacag

SEQ ID NO: 32818 - DNA, 20 bp, Artificial Sequence
  chemically synthesized
agttgcttaaacatgacagc

SEQ ID NO: 32819 - DNA, 20 bp, Artificial Sequence
  chemically synthesized
gcttaaacatgacagcagga

SEQ ID NO: 32820 - DNA, 20 bp, Artificial Sequence
  chemically synthesized
cttaaacatgacagcaggat

SEQ ID NO: 32821 - DNA, 20 bp, Artificial Sequence
  chemically synthesized
acataaaatttatttataaa

SEQ ID NO: 32822 - DNA, 20 bp, Artificial Sequence
  chemically synthesized
aaatttatttataaatggta

SEQ ID NO: 32823 - DNA, 20 bp, Artificial Sequence
  chemically synthesized
acctctgctgaacttcctca

SEQ ID NO: 32824 - DNA, 20 bp, Artificial Sequence
  chemically synthesized
cttcctcatagaatgttcat

SEQ ID NO: 32825 - DNA, 20 bp, Artificial Sequence
  chemically synthesized
agaatgttcatcagaaaaca

SEQ ID NO: 32826 - DNA, 20 bp, Artificial Sequence
  chemically synthesized
ttctatctactctttcttcc

SEQ ID NO: 32827 - DNA, 20 bp, Artificial Sequence
  chemically synthesized
accactgacatcatgaccct

SEQ ID NO: 32828 - DNA, 20 bp, Artificial Sequence
  chemically synthesized
gaccctcagttctattcccc

SEQ ID NO: 32829 - DNA, 20 bp, Artificial Sequence
  chemically synthesized
ctgcccactcccctgaaatc

SEQ ID NO: 32830 - DNA, 20 bp, Artificial Sequence
  chemically synthesized
ccataaatccaaccaccgcc

SEQ ID NO: 32831 - DNA, 20 bp, Artificial Sequence
  chemically synthesized
cataaatccaaccaccgcct

SEQ ID NO: 32832 - DNA, 20 bp, Artificial Sequence
  chemically synthesized
caaccaccgcctgggtatct

SEQ ID NO: 32833 - DNA, 20 bp, Artificial Sequence
  chemically synthesized
accgcctgggtatctcagtt

SEQ ID NO: 32834 - DNA, 20 bp, Artificial Sequence
  chemically synthesized
tccctccatcaactcaaatt

SEQ ID NO: 32835 - DNA, 20 bp, Artificial Sequence
  chemically synthesized
caactcaaatttggctgaca

SEQ ID NO: 32836 - DNA, 20 bp, Artificial Sequence
  chemically synthesized
aaatttggctgacacagttt

SEQ ID NO: 32837 - DNA, 20 bp, Artificial Sequence
  chemically synthesized
gctgacacagttttggattc

SEQ ID NO: 32838 - DNA, 20 bp, Artificial Sequence
  chemically synthesized
tgacacagttttggattcta

SEQ ID NO: 32839 - DNA, 20 bp, Artificial Sequence
  chemically synthesized
gttttggattctagagcatg

SEQ ID NO: 32840 - DNA, 20 bp, Artificial Sequence
  chemically synthesized
ttttggattctagagcatgc

SEQ ID NO: 32841 - DNA, 20 bp, Artificial Sequence
  chemically synthesized
tttgcactcactcttccctc

SEQ ID NO: 32842 - DNA, 20 bp, Artificial Sequence
  chemically synthesized
cccgtccttcctcactttgc

SEQ ID NO: 32843 - DNA, 20 bp, Artificial Sequence
  chemically synthesized
ccagttccaacttctctctg

SEQ ID NO: 32844 - DNA, 20 bp, Artificial Sequence
  chemically synthesized
ccaacttctctctgaagact

SEQ ID NO: 32845 - DNA, 20 bp, Artificial Sequence
  chemically synthesized
ttctctctgaagactcagtt

SEQ ID NO: 32846 - DNA, 20 bp, Artificial Sequence
  chemically synthesized
tctctctgaagactcagttt

SEQ ID NO: 32847 - DNA, 20 bp, Artificial Sequence
  chemically synthesized
ctgaagactcagtttaggta

SEQ ID NO: 32848 - DNA, 20 bp, Artificial Sequence
  chemically synthesized
tgaagactcagtttaggtac

SEQ ID NO: 32849 - DNA, 20 bp, Artificial Sequence
  chemically synthesized
agtttaggtacaggctcctt

SEQ ID NO: 32850 - DNA, 20 bp, Artificial Sequence
  chemically synthesized
gtttaggtacaggctccttt

SEQ ID NO: 32851 - DNA, 20 bp, Artificial Sequence
  chemically synthesized
aatttttttttgactctacc

SEQ ID NO: 32852 - DNA, 20 bp, Artificial Sequence
  chemically synthesized
ttttttgactctacctagcc

SEQ ID NO: 32853 - DNA, 20 bp, Artificial Sequence
  chemically synthesized
gactctacctagcccagact

SEQ ID NO: 32854 - DNA, 20 bp, Artificial Sequence
  chemically synthesized
tcatctacgatattaatctg

SEQ ID NO: 32855 - DNA, 20 bp, Artificial Sequence
  chemically synthesized
taatctgcagtgtcatgcac

SEQ ID NO: 32856 - DNA, 20 bp, Artificial Sequence
  chemically synthesized
acaaaatatttgctgaatga

SEQ ID NO: 32857 - DNA, 20 bp, Artificial Sequence
  chemically synthesized
tatttgctgaatgaaagaat

SEQ ID NO: 32858 - DNA, 20 bp, Artificial Sequence
  chemically synthesized
tttgctgaatgaaagaatga

SEQ ID NO: 32859 - DNA, 20 bp, Artificial Sequence
  chemically synthesized
aaagaatgagagttaacttt

SEQ ID NO: 32860 - DNA, 20 bp, Artificial Sequence
  chemically synthesized
aatgagagttaacttttagt

SEQ ID NO: 32861 - DNA, 20 bp, Artificial Sequence
  chemically synthesized
atgagagttaacttttagtc

SEQ ID NO: 32862 - DNA, 20 bp, Artificial Sequence
  chemically synthesized
ttaacttttagtcaggcata

SEQ ID NO: 32863 - DNA, 20 bp, Artificial Sequence
  chemically synthesized
ggcataaagataaaaaacca

SEQ ID NO: 32864 - DNA, 20 bp, Artificial Sequence
  chemically synthesized
aaaaccaaagtcttttactc

SEQ ID NO: 32865 - DNA, 20 bp, Artificial Sequence
  chemically synthesized
caaagtcttttactccggtg

SEQ ID NO: 32866 - DNA, 20 bp, Artificial Sequence
  chemically synthesized
aagtcttttactccggtgtg

SEQ ID NO: 32867 - DNA, 20 bp, Artificial Sequence
  chemically synthesized
actccggtgtggagtgtttt

SEQ ID NO: 32868 - DNA, 20 bp, Artificial Sequence
  chemically synthesized
ctccggtgtggagtgttttc

SEQ ID NO: 32869 - DNA, 20 bp, Artificial Sequence
  chemically synthesized
ttttcaggattcctaccaat

SEQ ID NO: 32870 - DNA, 20 bp, Artificial Sequence
  chemically synthesized
tttcaggattcctaccaatt

SEQ ID NO: 32871 - DNA, 20 bp, Artificial Sequence
  chemically synthesized
caggattcctaccaattagg

SEQ ID NO: 32872 - DNA, 20 bp, Artificial Sequence
  chemically synthesized
aggattcctaccaattagga

SEQ ID NO: 32873 - DNA, 20 bp, Artificial Sequence
  chemically synthesized
ggtgtttgattcttcaaact

SEQ ID NO: 32874 - DNA, 20 bp, Artificial Sequence
  chemically synthesized
aaacacctccccttaactga

SEQ ID NO: 32875 - DNA, 20 bp, Artificial Sequence
  chemically synthesized
actgatggattcttcaaact

SEQ ID NO: 32876 - DNA, 20 bp, Artificial Sequence
  chemically synthesized
ggattcttcaaactcagcat

SEQ ID NO: 32877 - DNA, 20 bp, Artificial Sequence
  chemically synthesized
tcttcaaactcagcatcagt

SEQ ID NO: 32878 - DNA, 20 bp, Artificial Sequence
  chemically synthesized
ttcaaactcagcatcagtta

SEQ ID NO: 32879 - DNA, 20 bp, Artificial Sequence
  chemically synthesized
tcaaactcagcatcagttag

SEQ ID NO: 32880 - DNA, 20 bp, Artificial Sequence
  chemically synthesized
caaactcagcatcagttaga

SEQ ID NO: 32881 - DNA, 20 bp, Artificial Sequence
  chemically synthesized
cagcatcagttagagggcat

SEQ ID NO: 32882 - DNA, 20 bp, Artificial Sequence
  chemically synthesized
agcatcagttagagggcatt

SEQ ID NO: 32883 - DNA, 20 bp, Artificial Sequence
  chemically synthesized
gcatcagttagagggcatta

SEQ ID NO: 32884 - DNA, 20 bp, Artificial Sequence
  chemically synthesized
cacttctcaaaccctgcatt

SEQ ID NO: 32885 - DNA, 20 bp, Artificial Sequence
  chemically synthesized
acttctcaaaccctgcattc

SEQ ID NO: 32886 - DNA, 20 bp, Artificial Sequence
  chemically synthesized
cttctcaaaccctgcattca

SEQ ID NO: 32887 - DNA, 20 bp, Artificial Sequence
  chemically synthesized
ctcaaaccctgcattcaggg

SEQ ID NO: 32888 - DNA, 20 bp, Artificial Sequence
  chemically synthesized
ttcagggaagatgtctgttg

SEQ ID NO: 32889 - DNA, 20 bp, Artificial Sequence
  chemically synthesized
tcagggaagatgtctgttgt

SEQ ID NO: 32890 - DNA, 20 bp, Artificial Sequence
  chemically synthesized
cagggaagatgtctgttgtg

SEQ ID NO: 32891 - DNA, 20 bp, Artificial Sequence
  chemically synthesized
ggaagatgtctgttgtgggg

SEQ ID NO: 32892 - DNA, 20 bp, Artificial Sequence
  chemically synthesized
atgtctgttgtggggtggtc

SEQ ID NO: 32893 - DNA, 20 bp, Artificial Sequence
  chemically synthesized
gtggggtggtctggcctact

SEQ ID NO: 32894 - DNA, 20 bp, Artificial Sequence
  chemically synthesized
tggtctggcctacttggcct

SEQ ID NO: 32895 - DNA, 20 bp, Artificial Sequence
  chemically synthesized
tggcctacttggcctgagcc

SEQ ID NO: 32896 - DNA, 20 bp, Artificial Sequence
  chemically synthesized
ggcctacttggcctgagcca

SEQ ID NO: 32897 - DNA, 20 bp, Artificial Sequence
  chemically synthesized
cttggcctgagccaaggttc

SEQ ID NO: 32898 - DNA, 20 bp, Artificial Sequence
  chemically synthesized
ttggcctgagccaaggttct

SEQ ID NO: 32899 - DNA, 20 bp, Artificial Sequence
  chemically synthesized
gcctgagccaaggttctggg

SEQ ID NO: 32900 - DNA, 20 bp, Artificial Sequence
  chemically synthesized
aggttctgggcagttctgtt

SEQ ID NO: 32901 - DNA, 20 bp, Artificial Sequence
  chemically synthesized
cagttacacatgcatgcgtt

SEQ ID NO: 32902 - DNA, 20 bp, Artificial Sequence
  chemically synthesized
catgcgttgagcattgattc

SEQ ID NO: 32903 - DNA, 20 bp, Artificial Sequence
  chemically synthesized
gttgagcattgattcaagcc

SEQ ID NO: 32904 - DNA, 20 bp, Artificial Sequence
  chemically synthesized
gcattgattcaagcctggcc

SEQ ID NO: 32905 - DNA, 20 bp, Artificial Sequence
  chemically synthesized
cattgattcaagcctggcct

SEQ ID NO: 32906 - DNA, 20 bp, Artificial Sequence
  chemically synthesized
ttcaagcctggcctgggcac

SEQ ID NO: 32907 - DNA, 20 bp, Artificial Sequence
  chemically synthesized
tcaagcctggcctgggcact

SEQ ID NO: 32908 - DNA, 20 bp, Artificial Sequence
  chemically synthesized
cctggcctgggcactaggca

SEQ ID NO: 32909 - DNA, 20 bp, Artificial Sequence
  chemically synthesized
ctgggcactaggcatggttt

SEQ ID NO: 32910 - DNA, 20 bp, Artificial Sequence
  chemically synthesized
ctaggcatggttttagatat

SEQ ID NO: 32911 - DNA, 20 bp, Artificial Sequence
  chemically synthesized
taggcatggttttagatatt

SEQ ID NO: 32912 - DNA, 20 bp, Artificial Sequence
  chemically synthesized
aggcatggttttagatatta

SEQ ID NO: 32913 - DNA, 20 bp, Artificial Sequence
  chemically synthesized
tattctgttttccttgcctt

SEQ ID NO: 32914 - DNA, 20 bp, Artificial Sequence
  chemically synthesized
ttttccttgccttaagatac

SEQ ID NO: 32915 - DNA, 20 bp, Artificial Sequence
  chemically synthesized
cttgccttaagataccagtc

SEQ ID NO: 32916 - DNA, 20 bp, Artificial Sequence
  chemically synthesized
gccttaagataccagtctag

SEQ ID NO: 32917 - DNA, 20 bp, Artificial Sequence
  chemically synthesized
ccttaagataccagtctagt

SEQ ID NO: 32918 - DNA, 20 bp, Artificial Sequence
  chemically synthesized
ttaagataccagtctagtag

SEQ ID NO: 32919 - DNA, 20 bp, Artificial Sequence
  chemically synthesized
ccagtctagtaggagccact

SEQ ID NO: 32920 - DNA, 20 bp, Artificial Sequence
  chemically synthesized
cagtctagtaggagccacta

SEQ ID NO: 32921 - DNA, 20 bp, Artificial Sequence
  chemically synthesized
agccactaaggccccttttt

SEQ ID NO: 32922 - DNA, 20 bp, Artificial Sequence
  chemically synthesized
ctaaggcccctttttgagcc

SEQ ID NO: 32923 - DNA, 20 bp, Artificial Sequence
  chemically synthesized
aacataccctgcttctaatc

SEQ ID NO: 32924 - DNA, 20 bp, Artificial Sequence
  chemically synthesized
cttctaatcaagtcatctat

SEQ ID NO: 32925 - DNA, 20 bp, Artificial Sequence
  chemically synthesized
ctaatcaagtcatctattgg

SEQ ID NO: 32926 - DNA, 20 bp, Artificial Sequence
  chemically synthesized
tcatctattggcagtgacct

SEQ ID NO: 32927 - DNA, 20 bp, Artificial Sequence
  chemically synthesized
catctattggcagtgacctt

SEQ ID NO: 32928 - DNA, 20 bp, Artificial Sequence
  chemically synthesized
cagtgaccttgggcaaatca

SEQ ID NO: 32929 - DNA, 20 bp, Artificial Sequence
  chemically synthesized
gggcaaatcatagtctctcc

SEQ ID NO: 32930 - DNA, 20 bp, Artificial Sequence
  chemically synthesized
attacttttctaattgaaac

SEQ ID NO: 32931 - DNA, 20 bp, Artificial Sequence
  chemically synthesized
aagaacctctctctataccc

SEQ ID NO: 32932 - DNA, 20 bp, Artificial Sequence
  chemically synthesized
ctataccccagatttatttt

SEQ ID NO: 32933 - DNA, 20 bp, Artificial Sequence
  chemically synthesized
tataccccagatttattttg

SEQ ID NO: 32934 - DNA, 20 bp, Artificial Sequence
  chemically synthesized
agatttattttgaggattat

SEQ ID NO: 32935 - DNA, 20 bp, Artificial Sequence
  chemically synthesized
gaggattatgagttaattca

SEQ ID NO: 32936 - DNA, 20 bp, Artificial Sequence
  chemically synthesized
taattcatagctaaaatgct

SEQ ID NO: 32937 - DNA, 20 bp, Artificial Sequence
  chemically synthesized
ctaaaatgcttagcacctaa

SEQ ID NO: 32938 - DNA, 20 bp, Artificial Sequence
  chemically synthesized
ttcaattgcgtattactaaa

SEQ ID NO: 32939 - DNA, 20 bp, Artificial Sequence
  chemically synthesized
aattgcgtattactaaaaag

SEQ ID NO: 32940 - DNA, 20 bp, Artificial Sequence
  chemically synthesized
attgcgtattactaaaaaga

SEQ ID NO: 32941 - DNA, 20 bp, Artificial Sequence
  chemically synthesized
aaaaagaaggaatgatttcc

SEQ ID NO: 32942 - DNA, 20 bp, Artificial Sequence
  chemically synthesized
aaagaaggaatgatttccta

SEQ ID NO: 32943 - DNA, 20 bp, Artificial Sequence
  chemically synthesized
aagaaggaatgatttcctag

SEQ ID NO: 32944 - DNA, 20 bp, Artificial Sequence
  chemically synthesized
gaaggaatgatttcctagag

SEQ ID NO: 32945 - DNA, 20 bp, Artificial Sequence
  chemically synthesized
aaggaatgatttcctagagg

SEQ ID NO: 32946 - DNA, 20 bp, Artificial Sequence
  chemically synthesized
cctagaggaggtgcttcttc

SEQ ID NO: 32947 - DNA, 20 bp, Artificial Sequence
  chemically synthesized
aggaggtgcttcttctggcc

SEQ ID NO: 32948 - DNA, 20 bp, Artificial Sequence
  chemically synthesized
ggaggtgcttcttctggcca

SEQ ID NO: 32949 - DNA, 20 bp, Artificial Sequence
  chemically synthesized
gaggtgcttcttctggccaa

SEQ ID NO: 32950 - DNA, 20 bp, Artificial Sequence
  chemically synthesized
cttctggccaagggctgatt

SEQ ID NO: 32951 - DNA, 20 bp, Artificial Sequence
  chemically synthesized
tctggccaagggctgattca

SEQ ID NO: 32952 - DNA, 20 bp, Artificial Sequence
  chemically synthesized
cagagccttaattaactaaa

SEQ ID NO: 32953 - DNA, 20 bp, Artificial Sequence
  chemically synthesized
cttaattaactaaatagatc

SEQ ID NO: 32954 - DNA, 20 bp, Artificial Sequence
  chemically synthesized
atagatcaagcatatctaac

SEQ ID NO: 32955 - DNA, 20 bp, Artificial Sequence
  chemically synthesized
aagcatatctaactggtcac

SEQ ID NO: 32956 - DNA, 20 bp, Artificial Sequence
  chemically synthesized
catatctaactggtcaccgg

SEQ ID NO: 32957 - DNA, 20 bp, Artificial Sequence
  chemically synthesized
atctaactggtcaccggaag

SEQ ID NO: 32958 - DNA, 20 bp, Artificial Sequence
  chemically synthesized
ggtcaccggaagtggtccat

SEQ ID NO: 32959 - DNA, 20 bp, Artificial Sequence
  chemically synthesized
gtcaccggaagtggtccatg

SEQ ID NO: 32960 - DNA, 20 bp, Artificial Sequence
  chemically synthesized
ggaagtggtccatgaggctg

SEQ ID NO: 32961 - DNA, 20 bp, Artificial Sequence
  chemically synthesized
ggtccatgaggctgcagcaa

SEQ ID NO: 32962 - DNA, 20 bp, Artificial Sequence
  chemically synthesized
gtccatgaggctgcagcaat

SEQ ID NO: 32963 - DNA, 20 bp, Artificial Sequence
  chemically synthesized
catgaggctgcagcaatggg

SEQ ID NO: 32964 - DNA, 20 bp, Artificial Sequence
  chemically synthesized
atgaggctgcagcaatggga

SEQ ID NO: 32965 - DNA, 20 bp, Artificial Sequence
  chemically synthesized
ctgcagcaatgggaaggtgt

SEQ ID NO: 32966 - DNA, 20 bp, Artificial Sequence
  chemically synthesized
gcagcaatgggaaggtgtca

SEQ ID NO: 32967 - DNA, 20 bp, Artificial Sequence
  chemically synthesized
gcaatgggaaggtgtcagag

SEQ ID NO: 32968 - DNA, 20 bp, Artificial Sequence
  chemically synthesized
caatgggaaggtgtcagagc

SEQ ID NO: 32969 - DNA, 20 bp, Artificial Sequence
  chemically synthesized
aatgggaaggtgtcagagca

SEQ ID NO: 32970 - DNA, 20 bp, Artificial Sequence
  chemically synthesized
atgggaaggtgtcagagcag

SEQ ID NO: 32971 - DNA, 20 bp, Artificial Sequence
  chemically synthesized
gaaggtgtcagagcaggggt

SEQ ID NO: 32972 - DNA, 20 bp, Artificial Sequence
  chemically synthesized
aaggtgtcagagcaggggtt

SEQ ID NO: 32973 - DNA, 20 bp, Artificial Sequence
  chemically synthesized
tcagagcaggggttgggaaa

SEQ ID NO: 32974 - DNA, 20 bp, Artificial Sequence
  chemically synthesized
caggggttgggaaaaagaca

SEQ ID NO: 32975 - DNA, 20 bp, Artificial Sequence
  chemically synthesized
ggggttgggaaaaagacata

SEQ ID NO: 32976 - DNA, 20 bp, Artificial Sequence
  chemically synthesized
ggttgggaaaaagacataga

SEQ ID NO: 32977 - DNA, 20 bp, Artificial Sequence
  chemically synthesized
gagagaaacgtgcatgtccg

SEQ ID NO: 32978 - DNA, 20 bp, Artificial Sequence
  chemically synthesized
agaaacgtgcatgtccgtag

SEQ ID NO: 32979 - DNA, 20 bp, Artificial Sequence
  chemically synthesized
aaacgtgcatgtccgtagtg

SEQ ID NO: 32980 - DNA, 20 bp, Artificial Sequence
  chemically synthesized
aacgtgcatgtccgtagtgg

SEQ ID NO: 32981 - DNA, 20 bp, Artificial Sequence
  chemically synthesized
acgtgcatgtccgtagtgga

SEQ ID NO: 32982 - DNA, 20 bp, Artificial Sequence
  chemically synthesized
cgtgcatgtccgtagtggag

SEQ ID NO: 32983 - DNA, 20 bp, Artificial Sequence
  chemically synthesized
tgcatgtccgtagtggaggg

SEQ ID NO: 32984 - DNA, 20 bp, Artificial Sequence
  chemically synthesized
ccgtagtggaggggagctct

SEQ ID NO: 32985 - DNA, 20 bp, Artificial Sequence
  chemically synthesized
cgtagtggaggggagctctt

SEQ ID NO: 32986 - DNA, 20 bp, Artificial Sequence
  chemically synthesized
gggagctcttaggatgtcta

SEQ ID NO: 32987 - DNA, 20 bp, Artificial Sequence
  chemically synthesized
taggatgtctacagatttcc

SEQ ID NO: 32988 - DNA, 20 bp, Artificial Sequence
  chemically synthesized
gacaataattgaaatgaaca

SEQ ID NO: 32989 - DNA, 20 bp, Artificial Sequence
  chemically synthesized
acaataattgaaatgaacaa

SEQ ID NO: 32990 - DNA, 20 bp, Artificial Sequence
  chemically synthesized
taattgaaatgaacaaaggc

SEQ ID NO: 32991 - DNA, 20 bp, Artificial Sequence
  chemically synthesized
aattgaaatgaacaaaggca

SEQ ID NO: 32992 - DNA, 20 bp, Artificial Sequence
  chemically synthesized
attgaaatgaacaaaggcaa

SEQ ID NO: 32993 - DNA, 20 bp, Artificial Sequence
  chemically synthesized
aaaggcaagggatgaccaat

SEQ ID NO: 32994 - DNA, 20 bp, Artificial Sequence
  chemically synthesized
aggcaagggatgaccaataa

SEQ ID NO: 32995 - DNA, 20 bp, Artificial Sequence
  chemically synthesized
atcacctttcccttgttctt

SEQ ID NO: 32996 - DNA, 20 bp, Artificial Sequence
  chemically synthesized
tttcccttgttcttcagctc

SEQ ID NO: 32997 - DNA, 20 bp, Artificial Sequence
  chemically synthesized
ttcagctccagctgtgccca

SEQ ID NO: 32998 - DNA, 20 bp, Artificial Sequence
  chemically synthesized
agctgtgcccacagacacca

SEQ ID NO: 32999 - DNA, 20 bp, Artificial Sequence
  chemically synthesized
gctgtgcccacagacaccac

SEQ ID NO: 33000 - DNA, 20 bp, Artificial Sequence
  chemically synthesized
ctgtgcccacagacaccaca

SEQ ID NO: 33001 - DNA, 20 bp, Artificial Sequence
  chemically synthesized
tgcccacagacaccacaggg

SEQ ID NO: 33002 - DNA, 20 bp, Artificial Sequence
  chemically synthesized
cacagggaagcctctgaaca

SEQ ID NO: 33003 - DNA, 20 bp, Artificial Sequence
  chemically synthesized
acagggaagcctctgaacac

SEQ ID NO: 33004 - DNA, 20 bp, Artificial Sequence
  chemically synthesized
cagggaagcctctgaacaca

SEQ ID NO: 33005 - DNA, 20 bp, Artificial Sequence
  chemically synthesized
agggaagcctctgaacacag

SEQ ID NO: 33006 - DNA, 20 bp, Artificial Sequence
  chemically synthesized
ctgaacacaggggtttgaac

SEQ ID NO: 33007 - DNA, 20 bp, Artificial Sequence
  chemically synthesized
tgaacacaggggtttgaacc

SEQ ID NO: 33008 - DNA, 20 bp, Artificial Sequence
  chemically synthesized
gaacacaggggtttgaacca

SEQ ID NO: 33009 - DNA, 20 bp, Artificial Sequence
  chemically synthesized
gtttgaaccagggcctctct

SEQ ID NO: 33010 - DNA, 20 bp, Artificial Sequence
  chemically synthesized
tttccaactctgataccctg

SEQ ID NO: 33011 - DNA, 20 bp, Artificial Sequence
  chemically synthesized
ctctgataccctgaagttct

SEQ ID NO: 33012 - DNA, 20 bp, Artificial Sequence
  chemically synthesized
tcagaaacttccataaattt

SEQ ID NO: 33013 - DNA, 20 bp, Artificial Sequence
  chemically synthesized
acttccataaattttggctg

SEQ ID NO: 33014 - DNA, 20 bp, Artificial Sequence
  chemically synthesized
tccataaattttggctgaag

SEQ ID NO: 33015 - DNA, 20 bp, Artificial Sequence
  chemically synthesized
aattttggctgaagaagcca

SEQ ID NO: 33016 - DNA, 20 bp, Artificial Sequence
  chemically synthesized
agaagccatagcaaacttgt

SEQ ID NO: 33017 - DNA, 20 bp, Artificial Sequence
  chemically synthesized
gccatagcaaacttgtcaga

SEQ ID NO: 33018 - DNA, 20 bp, Artificial Sequence
  chemically synthesized
atggtttcttacctttaact

SEQ ID NO: 33019 - DNA, 20 bp, Artificial Sequence
  chemically synthesized
ttttctctctcctctatgtg

SEQ ID NO: 33020 - DNA, 20 bp, Artificial Sequence
  chemically synthesized
tcctctatgtgtggtgactt

SEQ ID NO: 33021 - DNA, 20 bp, Artificial Sequence
  chemically synthesized
cctctatgtgtggtgacttc

SEQ ID NO: 33022 - DNA, 20 bp, Artificial Sequence
  chemically synthesized
tgtggtgacttcaggaaacc

SEQ ID NO: 33023 - DNA, 20 bp, Artificial Sequence
  chemically synthesized
gtggtgacttcaggaaaccc

SEQ ID NO: 33024 - DNA, 20 bp, Artificial Sequence
  chemically synthesized
gacttcaggaaacccaggcc

SEQ ID NO: 33025 - DNA, 20 bp, Artificial Sequence
  chemically synthesized
cttcaggaaacccaggccca

SEQ ID NO: 33026 - DNA, 20 bp, Artificial Sequence
  chemically synthesized
ttcaggaaacccaggcccag

SEQ ID NO: 33027 - DNA, 20 bp, Artificial Sequence
  chemically synthesized
acccaggcccagaggatata

SEQ ID NO: 33028 - DNA, 20 bp, Artificial Sequence
  chemically synthesized
ttctccttcaaaccactctt

SEQ ID NO: 33029 - DNA, 20 bp, Artificial Sequence
  chemically synthesized
aaaccactctttggatattc

SEQ ID NO: 33030 - DNA, 20 bp, Artificial Sequence
  chemically synthesized
actgcttcactgcgcttcac

SEQ ID NO: 33031 - DNA, 20 bp, Artificial Sequence
  chemically synthesized
cttcactgcgcttcactggt

SEQ ID NO: 33032 - DNA, 20 bp, Artificial Sequence
  chemically synthesized
ggtcagtgcgtcactcaaac

SEQ ID NO: 33033 - DNA, 20 bp, Artificial Sequence
  chemically synthesized
gcgtcactcaaactagctga

SEQ ID NO: 33034 - DNA, 20 bp, Artificial Sequence
  chemically synthesized
agaattgtctaactcataca

SEQ ID NO: 33035 - DNA, 20 bp, Artificial Sequence
  chemically synthesized
gaattgtctaactcatacac

SEQ ID NO: 33036 - DNA, 20 bp, Artificial Sequence
  chemically synthesized
aattgtctaactcatacaca

SEQ ID NO: 33037 - DNA, 20 bp, Artificial Sequence
  chemically synthesized
ctaactcatacacagggaca

SEQ ID NO: 33038 - DNA, 20 bp, Artificial Sequence
  chemically synthesized
tcatacacagggacaaagtc

SEQ ID NO: 33039 - DNA, 20 bp, Artificial Sequence
  chemically synthesized
acacagggacaaagtccagc

SEQ ID NO: 33040 - DNA, 20 bp, Artificial Sequence
  chemically synthesized
gtccagcaagcttatttaac

SEQ ID NO: 33041 - DNA, 20 bp, Artificial Sequence
  chemically synthesized
accggttacacaattgcctt

SEQ ID NO: 33042 - DNA, 20 bp, Artificial Sequence
  chemically synthesized
acaattgcctttggttttta

SEQ ID NO: 33043 - DNA, 20 bp, Artificial Sequence
  chemically synthesized
ggtttttacagtttgttcct

SEQ ID NO: 33044 - DNA, 20 bp, Artificial Sequence
  chemically synthesized
agtttgttcctaagtgtttc

SEQ ID NO: 33045 - DNA, 20 bp, Artificial Sequence
  chemically synthesized
tttgttcctaagtgtttcca

SEQ ID NO: 33046 - DNA, 20 bp, Artificial Sequence
  chemically synthesized
ttgttcctaagtgtttccag

SEQ ID NO: 33047 - DNA, 20 bp, Artificial Sequence
  chemically synthesized
cctaagtgtttccagaggct

SEQ ID NO: 33048 - DNA, 20 bp, Artificial Sequence
  chemically synthesized
ggcttggttcctcttcacct

SEQ ID NO: 33049 - DNA, 20 bp, Artificial Sequence
  chemically synthesized
gcttggttcctcttcacctg

SEQ ID NO: 33050 - DNA, 20 bp, Artificial Sequence
  chemically synthesized
tggttcctcttcacctgagg

SEQ ID NO: 33051 - DNA, 20 bp, Artificial Sequence
  chemically synthesized
gttcctcttcacctgaggta

SEQ ID NO: 33052 - DNA, 20 bp, Artificial Sequence
  chemically synthesized
gattgaccaattatttattc

SEQ ID NO: 33053 - DNA, 20 bp, Artificial Sequence
  chemically synthesized
caattatttattccagttaa

SEQ ID NO: 33054 - DNA, 20 bp, Artificial Sequence
  chemically synthesized
ttatttattccagttaaaag

SEQ ID NO: 33055 - DNA, 20 bp, Artificial Sequence
  chemically synthesized
tatttattccagttaaaagt

SEQ ID NO: 33056 - DNA, 20 bp, Artificial Sequence
  chemically synthesized
taaaagtaggcttatttcaa

SEQ ID NO: 33057 - DNA, 20 bp, Artificial Sequence
  chemically synthesized
aaaagtaggcttatttcaaa

SEQ ID NO: 33058 - DNA, 20 bp, Artificial Sequence
  chemically synthesized
agtaggcttatttcaaaagg

SEQ ID NO: 33059 - DNA, 20 bp, Artificial Sequence
  chemically synthesized
taggcttatttcaaaaggca

SEQ ID NO: 33060 - DNA, 20 bp, Artificial Sequence
  chemically synthesized
ttcaaaaggcagagaatttg

SEQ ID NO: 33061 - DNA, 20 bp, Artificial Sequence
  chemically synthesized
ggcagagaatttgaagctat

SEQ ID NO: 33062 - DNA, 20 bp, Artificial Sequence
  chemically synthesized
gcagagaatttgaagctatc

SEQ ID NO: 33063 - DNA, 20 bp, Artificial Sequence
  chemically synthesized
cagagaatttgaagctatcg

SEQ ID NO: 33064 - DNA, 20 bp, Artificial Sequence
  chemically synthesized
gaatttgaagctatcgggga

SEQ ID NO: 33065 - DNA, 20 bp, Artificial Sequence
  chemically synthesized
aatttgaagctatcggggaa

SEQ ID NO: 33066 - DNA, 20 bp, Artificial Sequence
  chemically synthesized
gctatcggggaaaggaactg

SEQ ID NO: 33067 - DNA, 20 bp, Artificial Sequence
  chemically synthesized
atcggggaaaggaactgtgg

SEQ ID NO: 33068 - DNA, 20 bp, Artificial Sequence
  chemically synthesized
gggaaaggaactgtggcaga

SEQ ID NO: 33069 - DNA, 20 bp, Artificial Sequence
  chemically synthesized
cagatagtgcctgctgtgtg

SEQ ID NO: 33070 - DNA, 20 bp, Artificial Sequence
  chemically synthesized
atagtgcctgctgtgtgtgg

SEQ ID NO: 33071 - DNA, 20 bp, Artificial Sequence
  chemically synthesized
agtgcctgctgtgtgtggtg

SEQ ID NO: 33072 - DNA, 20 bp, Artificial Sequence
  chemically synthesized
gtgcctgctgtgtgtggtgg

SEQ ID NO: 33073 - DNA, 20 bp, Artificial Sequence
  chemically synthesized
gtggtggaggattctctgct

SEQ ID NO: 33074 - DNA, 20 bp, Artificial Sequence
  chemically synthesized
ttctctgctcagtcctgact

SEQ ID NO: 33075 - DNA, 20 bp, Artificial Sequence
  chemically synthesized
tctctgctcagtcctgactc

SEQ ID NO: 33076 - DNA, 20 bp, Artificial Sequence
  chemically synthesized
tgctcagtcctgactcaggc

SEQ ID NO: 33077 - DNA, 20 bp, Artificial Sequence
  chemically synthesized
gctcagtcctgactcaggct

SEQ ID NO: 33078 - DNA, 20 bp, Artificial Sequence
  chemically synthesized
cagtcctgactcaggctagg

SEQ ID NO: 33079 - DNA, 20 bp, Artificial Sequence
  chemically synthesized
agtcctgactcaggctagga

SEQ ID NO: 33080 - DNA, 20 bp, Artificial Sequence
  chemically synthesized
tgactcaggctaggaaggaa

SEQ ID NO: 33081 - DNA, 20 bp, Artificial Sequence
  chemically synthesized
gactcaggctaggaaggaac

SEQ ID NO: 33082 - DNA, 20 bp, Artificial Sequence
  chemically synthesized
actcaggctaggaaggaaca

SEQ ID NO: 33083 - DNA, 20 bp, Artificial Sequence
  chemically synthesized
caggctaggaaggaacaggg

SEQ ID NO: 33084 - DNA, 20 bp, Artificial Sequence
  chemically synthesized
ggaaggaacagggcagtgct

SEQ ID NO: 33085 - DNA, 20 bp, Artificial Sequence
  chemically synthesized
cagggcagtgctgagtctcc

SEQ ID NO: 33086 - DNA, 20 bp, Artificial Sequence
  chemically synthesized
gggcagtgctgagtctcctg

SEQ ID NO: 33087 - DNA, 20 bp, Artificial Sequence
  chemically synthesized
agcactgccctgttccttcc

SEQ ID NO: 33088 - DNA, 20 bp, Artificial Sequence
  chemically synthesized
gccctgttccttcctagcct

SEQ ID NO: 33089 - DNA, 20 bp, Artificial Sequence
  chemically synthesized
tgttccttcctagcctgagt

SEQ ID NO: 33090 - DNA, 20 bp, Artificial Sequence
  chemically synthesized
gttccttcctagcctgagtc

SEQ ID NO: 33091 - DNA, 20 bp, Artificial Sequence
  chemically synthesized
tcctagcctgagtcaggact

SEQ ID NO: 33092 - DNA, 20 bp, Artificial Sequence
  chemically synthesized
tagcctgagtcaggactgag

SEQ ID NO: 33093 - DNA, 20 bp, Artificial Sequence
  chemically synthesized
gcctgagtcaggactgagca

SEQ ID NO: 33094 - DNA, 20 bp, Artificial Sequence
  chemically synthesized
agagaatcctccaccacaca

SEQ ID NO: 33095 - DNA, 20 bp, Artificial Sequence
  chemically synthesized
gaatcctccaccacacacag

SEQ ID NO: 33096 - DNA, 20 bp, Artificial Sequence
  chemically synthesized
aatcctccaccacacacagc

SEQ ID NO: 33097 - DNA, 20 bp, Artificial Sequence
  chemically synthesized
acagcaggcactatctgcca

SEQ ID NO: 33098 - DNA, 20 bp, Artificial Sequence
  chemically synthesized
gccacagttcctttccccga

SEQ ID NO: 33099 - DNA, 20 bp, Artificial Sequence
  chemically synthesized
aattctctgccttttgaaat

SEQ ID NO: 33100 - DNA, 20 bp, Artificial Sequence
  chemically synthesized
gaaataagcctacttttaac

SEQ ID NO: 33101 - DNA, 20 bp, Artificial Sequence
  chemically synthesized
ttttaactggaataaataat

SEQ ID NO: 33102 - DNA, 20 bp, Artificial Sequence
  chemically synthesized
taattggtcaatctctacct

SEQ ID NO: 33103 - DNA, 20 bp, Artificial Sequence
  chemically synthesized
aattggtcaatctctacctc

SEQ ID NO: 33104 - DNA, 20 bp, Artificial Sequence
  chemically synthesized
gtcaatctctacctcaggtg

SEQ ID NO: 33105 - DNA, 20 bp, Artificial Sequence
  chemically synthesized
caatctctacctcaggtgaa

SEQ ID NO: 33106 - DNA, 20 bp, Artificial Sequence
  chemically synthesized
aatctctacctcaggtgaag

SEQ ID NO: 33107 - DNA, 20 bp, Artificial Sequence
  chemically synthesized
acctcaggtgaagaggaacc

SEQ ID NO: 33108 - DNA, 20 bp, Artificial Sequence
  chemically synthesized
gtgaagaggaaccaagcctc

SEQ ID NO: 33109 - DNA, 20 bp, Artificial Sequence
  chemically synthesized
accaagcctctggaaacact

SEQ ID NO: 33110 - DNA, 20 bp, Artificial Sequence
  chemically synthesized
ccaagcctctggaaacactt

SEQ ID NO: 33111 - DNA, 20 bp, Artificial Sequence
  chemically synthesized
ggaacaaactgtaaaaacca

SEQ ID NO: 33112 - DNA, 20 bp, Artificial Sequence
  chemically synthesized
gaacaaactgtaaaaaccaa

SEQ ID NO: 33113 - DNA, 20 bp, Artificial Sequence
  chemically synthesized
accaaaggcaattgtgtaac

SEQ ID NO: 33114 - DNA, 20 bp, Artificial Sequence
  chemically synthesized
aattgtgtaaccggttaaat

SEQ ID NO: 33115 - DNA, 20 bp, Artificial Sequence
  chemically synthesized
aaccggttaaataagcttgc

SEQ ID NO: 33116 - DNA, 20 bp, Artificial Sequence
  chemically synthesized
tggactttgtccctgtgtat

SEQ ID NO: 33117 - DNA, 20 bp, Artificial Sequence
  chemically synthesized
ctttgtccctgtgtatgagt

SEQ ID NO: 33118 - DNA, 20 bp, Artificial Sequence
  chemically synthesized
tatgagttagacaattcttt

SEQ ID NO: 33119 - DNA, 20 bp, Artificial Sequence
  chemically synthesized
agttagacaattctttcagc

SEQ ID NO: 33120 - DNA, 20 bp, Artificial Sequence
  chemically synthesized
acaattctttcagctagttt

SEQ ID NO: 33121 - DNA, 20 bp, Artificial Sequence
  chemically synthesized
agtttgagtgacgcactgac

SEQ ID NO: 33122 - DNA, 20 bp, Artificial Sequence
  chemically synthesized
gagtgacgcactgaccagtg

SEQ ID NO: 33123 - DNA, 20 bp, Artificial Sequence
  chemically synthesized
acgcactgaccagtgaagcg

SEQ ID NO: 33124 - DNA, 20 bp, Artificial Sequence
  chemically synthesized
ctgaccagtgaagcgcagtg

SEQ ID NO: 33125 - DNA, 20 bp, Artificial Sequence
  chemically synthesized
accagtgaagcgcagtgaag

SEQ ID NO: 33126 - DNA, 20 bp, Artificial Sequence
  chemically synthesized
agtgaagcgcagtgaagcag

SEQ ID NO: 33127 - DNA, 20 bp, Artificial Sequence
  chemically synthesized
gtgaagcgcagtgaagcagt

SEQ ID NO: 33128 - DNA, 20 bp, Artificial Sequence
  chemically synthesized
cgcagtgaagcagtgggaac

SEQ ID NO: 33129 - DNA, 20 bp, Artificial Sequence
  chemically synthesized
agtgggaaccggaatatcca

SEQ ID NO: 33130 - DNA, 20 bp, Artificial Sequence
  chemically synthesized
tgggaaccggaatatccaaa

SEQ ID NO: 33131 - DNA, 20 bp, Artificial Sequence
  chemically synthesized
gaaccggaatatccaaagag

SEQ ID NO: 33132 - DNA, 20 bp, Artificial Sequence
  chemically synthesized
aatatccaaagagtggtttg

SEQ ID NO: 33133 - DNA, 20 bp, Artificial Sequence
  chemically synthesized
atatccaaagagtggtttga

SEQ ID NO: 33134 - DNA, 20 bp, Artificial Sequence
  chemically synthesized
atccaaagagtggtttgaag

SEQ ID NO: 33135 - DNA, 20 bp, Artificial Sequence
  chemically synthesized
aaagagtggtttgaaggaga

SEQ ID NO: 33136 - DNA, 20 bp, Artificial Sequence
  chemically synthesized
gagtggtttgaaggagaaag

SEQ ID NO: 33137 - DNA, 20 bp, Artificial Sequence
  chemically synthesized
tgaaggagaaagaagcattg

SEQ ID NO: 33138 - DNA, 20 bp, Artificial Sequence
  chemically synthesized
cattgtggctttatatcctc

SEQ ID NO: 33139 - DNA, 20 bp, Artificial Sequence
  chemically synthesized
attgtggctttatatcctct

SEQ ID NO: 33140 - DNA, 20 bp, Artificial Sequence
  chemically synthesized
ggctttatatcctctgggcc

SEQ ID NO: 33141 - DNA, 20 bp, Artificial Sequence
  chemically synthesized
gctttatatcctctgggcct

SEQ ID NO: 33142 - DNA, 20 bp, Artificial Sequence
  chemically synthesized
ctctgggcctgggtttcctg

SEQ ID NO: 33143 - DNA, 20 bp, Artificial Sequence
  chemically synthesized
tttcctgaagtcaccacaca

SEQ ID NO: 33144 - DNA, 20 bp, Artificial Sequence
  chemically synthesized
tcctgaagtcaccacacata

SEQ ID NO: 33145 - DNA, 20 bp, Artificial Sequence
  chemically synthesized
cctgaagtcaccacacatag

SEQ ID NO: 33146 - DNA, 20 bp, Artificial Sequence
  chemically synthesized
tgaagtcaccacacatagag

SEQ ID NO: 33147 - DNA, 20 bp, Artificial Sequence
  chemically synthesized
aagtcaccacacatagagga

SEQ ID NO: 33148 - DNA, 20 bp, Artificial Sequence
  chemically synthesized
gtcaccacacatagaggaga

SEQ ID NO: 33149 - DNA, 20 bp, Artificial Sequence
  chemically synthesized
cacatagaggagagagaaaa

SEQ ID NO: 33150 - DNA, 20 bp, Artificial Sequence
  chemically synthesized
agaggagagagaaaatggct

SEQ ID NO: 33151 - DNA, 20 bp, Artificial Sequence
  chemically synthesized
gagagaaaatggctgagtta

SEQ ID NO: 33152 - DNA, 20 bp, Artificial Sequence
  chemically synthesized
agagaaaatggctgagttaa

SEQ ID NO: 33153 - DNA, 20 bp, Artificial Sequence
  chemically synthesized
aaaatggctgagttaaaggt

SEQ ID NO: 33154 - DNA, 20 bp, Artificial Sequence
  chemically synthesized
aaggtaagaaaccatctgac

SEQ ID NO: 33155 - DNA, 20 bp, Artificial Sequence
  chemically synthesized
accatctgacaagtttgcta

SEQ ID NO: 33156 - DNA, 20 bp, Artificial Sequence
  chemically synthesized
caagtttgctatggcttctt

SEQ ID NO: 33157 - DNA, 20 bp, Artificial Sequence
  chemically synthesized
gcttcttcagccaaaattta

SEQ ID NO: 33158 - DNA, 20 bp, Artificial Sequence
  chemically synthesized
tcttcagccaaaatttatgg

SEQ ID NO: 33159 - DNA, 20 bp, Artificial Sequence
  chemically synthesized
caaaatttatggaagtttct

SEQ ID NO: 33160 - DNA, 20 bp, Artificial Sequence
  chemically synthesized
atggaagtttctgagaactt

SEQ ID NO: 33161 - DNA, 20 bp, Artificial Sequence
  chemically synthesized
tggaagtttctgagaacttc

SEQ ID NO: 33162 - DNA, 20 bp, Artificial Sequence
  chemically synthesized
ggaagtttctgagaacttca

SEQ ID NO: 33163 - DNA, 20 bp, Artificial Sequence
  chemically synthesized
ttctgagaacttcagggtat

SEQ ID NO: 33164 - DNA, 20 bp, Artificial Sequence
  chemically synthesized
ctgagaacttcagggtatca

SEQ ID NO: 33165 - DNA, 20 bp, Artificial Sequence
  chemically synthesized
gaacttcagggtatcagagt

SEQ ID NO: 33166 - DNA, 20 bp, Artificial Sequence
  chemically synthesized
tcagggtatcagagttggaa

SEQ ID NO: 33167 - DNA, 20 bp, Artificial Sequence
  chemically synthesized
tatcagagttggaaaagact

SEQ ID NO: 33168 - DNA, 20 bp, Artificial Sequence
  chemically synthesized
tcagagttggaaaagactta

SEQ ID NO: 33169 - DNA, 20 bp, Artificial Sequence
  chemically synthesized
agagttggaaaagacttaga

SEQ ID NO: 33170 - DNA, 20 bp, Artificial Sequence
  chemically synthesized
gagttggaaaagacttagag

SEQ ID NO: 33171 - DNA, 20 bp, Artificial Sequence
  chemically synthesized
gaaaagacttagagaggccc

SEQ ID NO: 33172 - DNA, 20 bp, Artificial Sequence
  chemically synthesized
ctggttcaaacccctgtgtt

SEQ ID NO: 33173 - DNA, 20 bp, Artificial Sequence
  chemically synthesized
ggttcaaacccctgtgttca

SEQ ID NO: 33174 - DNA, 20 bp, Artificial Sequence
  chemically synthesized
gttcaaacccctgtgttcag

SEQ ID NO: 33175 - DNA, 20 bp, Artificial Sequence
  chemically synthesized
tgtgttcagaggcttccctg

SEQ ID NO: 33176 - DNA, 20 bp, Artificial Sequence
  chemically synthesized
aggcttccctgtggtgtctg

SEQ ID NO: 33177 - DNA, 20 bp, Artificial Sequence
  chemically synthesized
ggcttccctgtggtgtctgt

SEQ ID NO: 33178 - DNA, 20 bp, Artificial Sequence
  chemically synthesized
ccctgtggtgtctgtgggca

SEQ ID NO: 33179 - DNA, 20 bp, Artificial Sequence
  chemically synthesized
gtggtgtctgtgggcacagc

SEQ ID NO: 33180 - DNA, 20 bp, Artificial Sequence
  chemically synthesized
ggtgtctgtgggcacagctg

SEQ ID NO: 33181 - DNA, 20 bp, Artificial Sequence
  chemically synthesized
tgtgggcacagctggagctg

SEQ ID NO: 33182 - DNA, 20 bp, Artificial Sequence
  chemically synthesized
cacagctggagctgaagaac

SEQ ID NO: 33183 - DNA, 20 bp, Artificial Sequence
  chemically synthesized
acagctggagctgaagaaca

SEQ ID NO: 33184 - DNA, 20 bp, Artificial Sequence
  chemically synthesized
cagctggagctgaagaacaa

SEQ ID NO: 33185 - DNA, 20 bp, Artificial Sequence
  chemically synthesized
tggagctgaagaacaaggga

SEQ ID NO: 33186 - DNA, 20 bp, Artificial Sequence
  chemically synthesized
ggagctgaagaacaagggaa

SEQ ID NO: 33187 - DNA, 20 bp, Artificial Sequence
  chemically synthesized
agaacaagggaaaggtgata

SEQ ID NO: 33188 - DNA, 20 bp, Artificial Sequence
  chemically synthesized
gaacaagggaaaggtgataa

SEQ ID NO: 33189 - DNA, 20 bp, Artificial Sequence
  chemically synthesized
aagggaaaggtgataaagga

SEQ ID NO: 33190 - DNA, 20 bp, Artificial Sequence
  chemically synthesized
ggtgataaaggaaagaaatg

SEQ ID NO: 33191 - DNA, 20 bp, Artificial Sequence
  chemically synthesized
gaaagaaatgaagctcttat

SEQ ID NO: 33192 - DNA, 20 bp, Artificial Sequence
  chemically synthesized
gttcatttcaattattgtct

SEQ ID NO: 33193 - DNA, 20 bp, Artificial Sequence
  chemically synthesized
attattgtcttggaaatctg

SEQ ID NO: 33194 - DNA, 20 bp, Artificial Sequence
  chemically synthesized
tggaaatctgtagacatcct

SEQ ID NO: 33195 - DNA, 20 bp, Artificial Sequence
  chemically synthesized
gaaatctgtagacatcctaa

SEQ ID NO: 33196 - DNA, 20 bp, Artificial Sequence
  chemically synthesized
ctaagagctcccctccacta

SEQ ID NO: 33197 - DNA, 20 bp, Artificial Sequence
  chemically synthesized
ctgacaccttcccattgctg

SEQ ID NO: 33198 - DNA, 20 bp, Artificial Sequence
  chemically synthesized
ttcccattgctgcagcctca

SEQ ID NO: 33199 - DNA, 20 bp, Artificial Sequence
  chemically synthesized
gcagcctcatggaccacttc

SEQ ID NO: 33200 - DNA, 20 bp, Artificial Sequence
  chemically synthesized
catggaccacttccggtgac

SEQ ID NO: 33201 - DNA, 20 bp, Artificial Sequence
  chemically synthesized
gaccacttccggtgaccagt

SEQ ID NO: 33202 - DNA, 20 bp, Artificial Sequence
  chemically synthesized
ttagatatgcttgatctatt

SEQ ID NO: 33203 - DNA, 20 bp, Artificial Sequence
  chemically synthesized
cttgatctatttagttaatt

SEQ ID NO: 33204 - DNA, 20 bp, Artificial Sequence
  chemically synthesized
ttgatctatttagttaatta

SEQ ID NO: 33205 - DNA, 20 bp, Artificial Sequence
  chemically synthesized
agttaattaaggctctgaat

SEQ ID NO: 33206 - DNA, 20 bp, Artificial Sequence
  chemically synthesized
taaggctctgaatcagccct

SEQ ID NO: 33207 - DNA, 20 bp, Artificial Sequence
  chemically synthesized
gctctgaatcagcccttggc

SEQ ID NO: 33208 - DNA, 20 bp, Artificial Sequence
  chemically synthesized
ctgaatcagcccttggccag

SEQ ID NO: 33209 - DNA, 20 bp, Artificial Sequence
  chemically synthesized
aatcagcccttggccagaag

SEQ ID NO: 33210 - DNA, 20 bp, Artificial Sequence
  chemically synthesized
gccagaagaagcacctcctc

SEQ ID NO: 33211 - DNA, 20 bp, Artificial Sequence
  chemically synthesized
ccagaagaagcacctcctct

SEQ ID NO: 33212 - DNA, 20 bp, Artificial Sequence
  chemically synthesized
aggaaatcattccttctttt

SEQ ID NO: 33213 - DNA, 20 bp, Artificial Sequence
  chemically synthesized
tttagtaatacgcaattgaa

SEQ ID NO: 33214 - DNA, 20 bp, Artificial Sequence
  chemically synthesized
acgcaattgaaaagtatgtg

SEQ ID NO: 33215 - DNA, 20 bp, Artificial Sequence
  chemically synthesized
cgcaattgaaaagtatgtgt

SEQ ID NO: 33216 - DNA, 20 bp, Artificial Sequence
  chemically synthesized
atgtgtgggttatgtgctgt

SEQ ID NO: 33217 - DNA, 20 bp, Artificial Sequence
  chemically synthesized
tgtgtgggttatgtgctgtt

SEQ ID NO: 33218 - DNA, 20 bp, Artificial Sequence
  chemically synthesized
gttatgtgctgttaggtgct

SEQ ID NO: 33219 - DNA, 20 bp, Artificial Sequence
  chemically synthesized
ctgttaggtgctaagcattt

SEQ ID NO: 33220 - DNA, 20 bp, Artificial Sequence
  chemically synthesized
cataatcctcaaaataaatc

SEQ ID NO: 33221 - DNA, 20 bp, Artificial Sequence
  chemically synthesized
ataatcctcaaaataaatct

SEQ ID NO: 33222 - DNA, 20 bp, Artificial Sequence
  chemically synthesized
taatcctcaaaataaatctg

SEQ ID NO: 33223 - DNA, 20 bp, Artificial Sequence
  chemically synthesized
ctcaaaataaatctggggta

SEQ ID NO: 33224 - DNA, 20 bp, Artificial Sequence
  chemically synthesized
caaaataaatctggggtata

SEQ ID NO: 33225 - DNA, 20 bp, Artificial Sequence
  chemically synthesized
aaataaatctggggtataga

SEQ ID NO: 33226 - DNA, 20 bp, Artificial Sequence
  chemically synthesized
ataaatctggggtatagaga

SEQ ID NO: 33227 - DNA, 20 bp, Artificial Sequence
  chemically synthesized
taaatctggggtatagagag

SEQ ID NO: 33228 - DNA, 20 bp, Artificial Sequence
  chemically synthesized
agagaggttcttgtttcaat

SEQ ID NO: 33229 - DNA, 20 bp, Artificial Sequence
  chemically synthesized
ggttcttgtttcaattagaa

SEQ ID NO: 33230 - DNA, 20 bp, Artificial Sequence
  chemically synthesized
tcaattagaaaagtaatgct

SEQ ID NO: 33231 - DNA, 20 bp, Artificial Sequence
  chemically synthesized
aattagaaaagtaatgcttg

SEQ ID NO: 33232 - DNA, 20 bp, Artificial Sequence
  chemically synthesized
ttagaaaagtaatgcttgga

SEQ ID NO: 33233 - DNA, 20 bp, Artificial Sequence
  chemically synthesized
ggagagactatgatttgccc

SEQ ID NO: 33234 - DNA, 20 bp, Artificial Sequence
  chemically synthesized
gagagactatgatttgccca

SEQ ID NO: 33235 - DNA, 20 bp, Artificial Sequence
  chemically synthesized
ttgcccaaggtcactgccaa

SEQ ID NO: 33236 - DNA, 20 bp, Artificial Sequence
  chemically synthesized
ctgccaatagatgacttgat

SEQ ID NO: 33237 - DNA, 20 bp, Artificial Sequence
  chemically synthesized
ccaatagatgacttgattag

SEQ ID NO: 33238 - DNA, 20 bp, Artificial Sequence
  chemically synthesized
atagatgacttgattagaag

SEQ ID NO: 33239 - DNA, 20 bp, Artificial Sequence
  chemically synthesized
tagatgacttgattagaagc

SEQ ID NO: 33240 - DNA, 20 bp, Artificial Sequence
  chemically synthesized
agatgacttgattagaagca

SEQ ID NO: 33241 - DNA, 20 bp, Artificial Sequence
  chemically synthesized
gcagggtatgtttgaatgcg

SEQ ID NO: 33242 - DNA, 20 bp, Artificial Sequence
  chemically synthesized
gtatgtttgaatgcgaagtc

SEQ ID NO: 33243 - DNA, 20 bp, Artificial Sequence
  chemically synthesized
tatgtttgaatgcgaagtcc

SEQ ID NO: 33244 - DNA, 20 bp, Artificial Sequence
  chemically synthesized
atgcgaagtccaggctcaaa

SEQ ID NO: 33245 - DNA, 20 bp, Artificial Sequence
  chemically synthesized
tgcgaagtccaggctcaaaa

SEQ ID NO: 33246 - DNA, 20 bp, Artificial Sequence
  chemically synthesized
gcgaagtccaggctcaaaaa

SEQ ID NO: 33247 - DNA, 20 bp, Artificial Sequence
  chemically synthesized
cgaagtccaggctcaaaaag

SEQ ID NO: 33248 - DNA, 20 bp, Artificial Sequence
  chemically synthesized
ccaggctcaaaaaggggcct

SEQ ID NO: 33249 - DNA, 20 bp, Artificial Sequence
  chemically synthesized
ggctcaaaaaggggccttag

SEQ ID NO: 33250 - DNA, 20 bp, Artificial Sequence
  chemically synthesized
ggggccttagtggctcctac

SEQ ID NO: 33251 - DNA, 20 bp, Artificial Sequence
  chemically synthesized
cttagtggctcctactagac

SEQ ID NO: 33252 - DNA, 20 bp, Artificial Sequence
  chemically synthesized
tcctactagactggtatctt

SEQ ID NO: 33253 - DNA, 20 bp, Artificial Sequence
  chemically synthesized
cctactagactggtatctta

SEQ ID NO: 33254 - DNA, 20 bp, Artificial Sequence
  chemically synthesized
ctagactggtatcttaaggc

SEQ ID NO: 33255 - DNA, 20 bp, Artificial Sequence
  chemically synthesized
tagactggtatcttaaggca

SEQ ID NO: 33256 - DNA, 20 bp, Artificial Sequence
  chemically synthesized
gtatcttaaggcaaggaaaa

SEQ ID NO: 33257 - DNA, 20 bp, Artificial Sequence
  chemically synthesized
ctaatatctaaaaccatgcc

SEQ ID NO: 33258 - DNA, 20 bp, Artificial Sequence
  chemically synthesized
ctaaaaccatgcctagtgcc

SEQ ID NO: 33259 - DNA, 20 bp, Artificial Sequence
  chemically synthesized
taaaaccatgcctagtgccc

SEQ ID NO: 33260 - DNA, 20 bp, Artificial Sequence
  chemically synthesized
accatgcctagtgcccaggc

SEQ ID NO: 33261 - DNA, 20 bp, Artificial Sequence
  chemically synthesized
ccatgcctagtgcccaggcc

SEQ ID NO: 33262 - DNA, 20 bp, Artificial Sequence
  chemically synthesized
cgcatgcatgtgtaactgaa

SEQ ID NO: 33263 - DNA, 20 bp, Artificial Sequence
  chemically synthesized
tgtaactgaacagaactgcc

SEQ ID NO: 33264 - DNA, 20 bp, Artificial Sequence
  chemically synthesized
aacagaactgcccagaacct

SEQ ID NO: 33265 - DNA, 20 bp, Artificial Sequence
  chemically synthesized
aactgcccagaaccttggct

SEQ ID NO: 33266 - DNA, 20 bp, Artificial Sequence
  chemically synthesized
actgcccagaaccttggctc

SEQ ID NO: 33267 - DNA, 20 bp, Artificial Sequence
  chemically synthesized
ccagaaccttggctcaggcc

SEQ ID NO: 33268 - DNA, 20 bp, Artificial Sequence
  chemically synthesized
gaaccttggctcaggccaag

SEQ ID NO: 33269 - DNA, 20 bp, Artificial Sequence
  chemically synthesized
aaccttggctcaggccaagt

SEQ ID NO: 33270 - DNA, 20 bp, Artificial Sequence
  chemically synthesized
ttggctcaggccaagtaggc

SEQ ID NO: 33271 - DNA, 20 bp, Artificial Sequence
  chemically synthesized
taggccagaccaccccacaa

SEQ ID NO: 33272 - DNA, 20 bp, Artificial Sequence
  chemically synthesized
acagacatcttccctgaatg

SEQ ID NO: 33273 - DNA, 20 bp, Artificial Sequence
  chemically synthesized
cagacatcttccctgaatgc

SEQ ID NO: 33274 - DNA, 20 bp, Artificial Sequence
  chemically synthesized
agacatcttccctgaatgca

SEQ ID NO: 33275 - DNA, 20 bp, Artificial Sequence
  chemically synthesized
cttccctgaatgcagggttt

SEQ ID NO: 33276 - DNA, 20 bp, Artificial Sequence
  chemically synthesized
ccctgaatgcagggtttgag

SEQ ID NO: 33277 - DNA, 20 bp, Artificial Sequence
  chemically synthesized
aatgccctctaactgatgct

SEQ ID NO: 33278 - DNA, 20 bp, Artificial Sequence
  chemically synthesized
tctaactgatgctgagtttg

SEQ ID NO: 33279 - DNA, 20 bp, Artificial Sequence
  chemically synthesized
gctgagtttgaagaatccat

SEQ ID NO: 33280 - DNA, 20 bp, Artificial Sequence
  chemically synthesized
gtttgaagaatccatcagtt

SEQ ID NO: 33281 - DNA, 20 bp, Artificial Sequence
  chemically synthesized
tttgaagaatccatcagtta

SEQ ID NO: 33282 - DNA, 20 bp, Artificial Sequence
  chemically synthesized
ttgaagaatccatcagttaa

SEQ ID NO: 33283 - DNA, 20 bp, Artificial Sequence
  chemically synthesized
tgaagaatccatcagttaag

SEQ ID NO: 33284 - DNA, 20 bp, Artificial Sequence
  chemically synthesized
aagaatccatcagttaaggg

SEQ ID NO: 33285 - DNA, 20 bp, Artificial Sequence
  chemically synthesized
agaatccatcagttaagggg

SEQ ID NO: 33286 - DNA, 20 bp, Artificial Sequence
  chemically synthesized
agttaaggggaggtgtttct

SEQ ID NO: 33287 - DNA, 20 bp, Artificial Sequence
  chemically synthesized
gggaggtgtttctgagtttg

SEQ ID NO: 33288 - DNA, 20 bp, Artificial Sequence
  chemically synthesized
gaatcaaacaccttcctaat

SEQ ID NO: 33289 - DNA, 20 bp, Artificial Sequence
  chemically synthesized
tcaaacaccttcctaattgg

SEQ ID NO: 33290 - DNA, 20 bp, Artificial Sequence
  chemically synthesized
caaacaccttcctaattggt

SEQ ID NO: 33291 - DNA, 20 bp, Artificial Sequence
  chemically synthesized
atcctgaaaacactccacac

SEQ ID NO: 33292 - DNA, 20 bp, Artificial Sequence
  chemically synthesized
cctgaaaacactccacaccg

SEQ ID NO: 33293 - DNA, 20 bp, Artificial Sequence
  chemically synthesized
aacactccacaccggagtaa

SEQ ID NO: 33294 - DNA, 20 bp, Artificial Sequence
  chemically synthesized
cacaccggagtaaaagactt

SEQ ID NO: 33295 - DNA, 20 bp, Artificial Sequence
  chemically synthesized
ttatctttatgcctgactaa

SEQ ID NO: 33296 - DNA, 20 bp, Artificial Sequence
  chemically synthesized
ttaactctcattctttcatt

SEQ ID NO: 33297 - DNA, 20 bp, Artificial Sequence
  chemically synthesized
attcagcaaatattttgtgc

SEQ ID NO: 33298 - DNA, 20 bp, Artificial Sequence
  chemically synthesized
tgtgctagtgcatgacactg

SEQ ID NO: 33299 - DNA, 20 bp, Artificial Sequence
  chemically synthesized
gacactgcagattaatatcg

SEQ ID NO: 33300 - DNA, 20 bp, Artificial Sequence
  chemically synthesized
attaatatcgtagatgaact

SEQ ID NO: 33301 - DNA, 20 bp, Artificial Sequence
  chemically synthesized
tatcgtagatgaactgagtc

SEQ ID NO: 33302 - DNA, 20 bp, Artificial Sequence
  chemically synthesized
atcgtagatgaactgagtct

SEQ ID NO: 33303 - DNA, 20 bp, Artificial Sequence
  chemically synthesized
tagatgaactgagtctgggc

SEQ ID NO: 33304 - DNA, 20 bp, Artificial Sequence
  chemically synthesized
agatgaactgagtctgggct

SEQ ID NO: 33305 - DNA, 20 bp, Artificial Sequence
  chemically synthesized
tgaactgagtctgggctagg

SEQ ID NO: 33306 - DNA, 20 bp, Artificial Sequence
  chemically synthesized
aactgagtctgggctaggta

SEQ ID NO: 33307 - DNA, 20 bp, Artificial Sequence
  chemically synthesized
agtcaaaaaaaaatttccta

SEQ ID NO: 33308 - DNA, 20 bp, Artificial Sequence
  chemically synthesized
gtcaaaaaaaaatttcctaa

SEQ ID NO: 33309 - DNA, 20 bp, Artificial Sequence
  chemically synthesized
caaaaaaaaatttcctaaag

SEQ ID NO: 33310 - DNA, 20 bp, Artificial Sequence
  chemically synthesized
aaggagcctgtacctaaact

SEQ ID NO: 33311 - DNA, 20 bp, Artificial Sequence
  chemically synthesized
ctgtacctaaactgagtctt

SEQ ID NO: 33312 - DNA, 20 bp, Artificial Sequence
  chemically synthesized
gtacctaaactgagtcttca

SEQ ID NO: 33313 - DNA, 20 bp, Artificial Sequence
  chemically synthesized
acctaaactgagtcttcaga

SEQ ID NO: 33314 - DNA, 20 bp, Artificial Sequence
  chemically synthesized
taaactgagtcttcagagag

SEQ ID NO: 33315 - DNA, 20 bp, Artificial Sequence
  chemically synthesized
ctgagtcttcagagagaagt

SEQ ID NO: 33316 - DNA, 20 bp, Artificial Sequence
  chemically synthesized
cttcagagagaagttggaac

SEQ ID NO: 33317 - DNA, 20 bp, Artificial Sequence
  chemically synthesized
gagagaagttggaactggca

SEQ ID NO: 33318 - DNA, 20 bp, Artificial Sequence
  chemically synthesized
gaagttggaactggcaaagt

SEQ ID NO: 33319 - DNA, 20 bp, Artificial Sequence
  chemically synthesized
aagttggaactggcaaagtg

SEQ ID NO: 33320 - DNA, 20 bp, Artificial Sequence
  chemically synthesized
ttggaactggcaaagtgagg

SEQ ID NO: 33321 - DNA, 20 bp, Artificial Sequence
  chemically synthesized
tggaactggcaaagtgagga

SEQ ID NO: 33322 - DNA, 20 bp, Artificial Sequence
  chemically synthesized
actggcaaagtgaggaagga

SEQ ID NO: 33323 - DNA, 20 bp, Artificial Sequence
  chemically synthesized
ctggcaaagtgaggaaggac

SEQ ID NO: 33324 - DNA, 20 bp, Artificial Sequence
  chemically synthesized
tggcaaagtgaggaaggacg

SEQ ID NO: 33325 - DNA, 20 bp, Artificial Sequence
  chemically synthesized
aagtgaggaaggacggggtc

SEQ ID NO: 33326 - DNA, 20 bp, Artificial Sequence
  chemically synthesized
gtgaggaaggacggggtctg

SEQ ID NO: 33327 - DNA, 20 bp, Artificial Sequence
  chemically synthesized
tgaggaaggacggggtctgg

SEQ ID NO: 33328 - DNA, 20 bp, Artificial Sequence
  chemically synthesized
gaggaaggacggggtctgga

SEQ ID NO: 33329 - DNA, 20 bp, Artificial Sequence
  chemically synthesized
gaaggacggggtctggaggg

SEQ ID NO: 33330 - DNA, 20 bp, Artificial Sequence
  chemically synthesized
aggacggggtctggagggaa

SEQ ID NO: 33331 - DNA, 20 bp, Artificial Sequence
  chemically synthesized
cggggtctggagggaagagt

SEQ ID NO: 33332 - DNA, 20 bp, Artificial Sequence
  chemically synthesized
tggagggaagagtgagtgca

SEQ ID NO: 33333 - DNA, 20 bp, Artificial Sequence
  chemically synthesized
ggagggaagagtgagtgcaa

SEQ ID NO: 33334 - DNA, 20 bp, Artificial Sequence
  chemically synthesized
gaagagtgagtgcaaaggca

SEQ ID NO: 33335 - DNA, 20 bp, Artificial Sequence
  chemically synthesized
gtgcaaaggcacagcacata

SEQ ID NO: 33336 - DNA, 20 bp, Artificial Sequence
  chemically synthesized
tacagaatgcctgcatgctc

SEQ ID NO: 33337 - DNA, 20 bp, Artificial Sequence
  chemically synthesized
tctagaatccaaaactgtgt

SEQ ID NO: 33338 - DNA, 20 bp, Artificial Sequence
  chemically synthesized
aaactgtgtcagccaaattt

SEQ ID NO: 33339 - DNA, 20 bp, Artificial Sequence
  chemically synthesized
gtcagccaaatttgagttga

SEQ ID NO: 33340 - DNA, 20 bp, Artificial Sequence
  chemically synthesized
cagccaaatttgagttgatg

SEQ ID NO: 33341 - DNA, 20 bp, Artificial Sequence
  chemically synthesized
agccaaatttgagttgatgg

SEQ ID NO: 33342 - DNA, 20 bp, Artificial Sequence
  chemically synthesized
gccaaatttgagttgatgga

SEQ ID NO: 33343 - DNA, 20 bp, Artificial Sequence
  chemically synthesized
aatttgagttgatggaggga

SEQ ID NO: 33344 - DNA, 20 bp, Artificial Sequence
  chemically synthesized
gatggagggacagccaaact

SEQ ID NO: 33345 - DNA, 20 bp, Artificial Sequence
  chemically synthesized
gacagccaaactgagatacc

SEQ ID NO: 33346 - DNA, 20 bp, Artificial Sequence
  chemically synthesized
acagccaaactgagataccc

SEQ ID NO: 33347 - DNA, 20 bp, Artificial Sequence
  chemically synthesized
gccaaactgagatacccagg

SEQ ID NO: 33348 - DNA, 20 bp, Artificial Sequence
  chemically synthesized
aaactgagatacccaggcgg

SEQ ID NO: 33349 - DNA, 20 bp, Artificial Sequence
  chemically synthesized
tgagatacccaggcggtggt

SEQ ID NO: 33350 - DNA, 20 bp, Artificial Sequence
  chemically synthesized
ccaggcggtggttggattta

SEQ ID NO: 33351 - DNA, 20 bp, Artificial Sequence
  chemically synthesized
ggtggttggatttatggatc

SEQ ID NO: 33352 - DNA, 20 bp, Artificial Sequence
  chemically synthesized
ggatttatggatctggattt

SEQ ID NO: 33353 - DNA, 20 bp, Artificial Sequence
  chemically synthesized
gatttatggatctggatttc

SEQ ID NO: 33354 - DNA, 20 bp, Artificial Sequence
  chemically synthesized
atttatggatctggatttca

SEQ ID NO: 33355 - DNA, 20 bp, Artificial Sequence
  chemically synthesized
tttatggatctggatttcag

SEQ ID NO: 33356 - DNA, 20 bp, Artificial Sequence
  chemically synthesized
tatggatctggatttcaggg

SEQ ID NO: 33357 - DNA, 20 bp, Artificial Sequence
  chemically synthesized
ggatctggatttcaggggag

SEQ ID NO: 33358 - DNA, 20 bp, Artificial Sequence
  chemically synthesized
gatctggatttcaggggagt

SEQ ID NO: 33359 - DNA, 20 bp, Artificial Sequence
  chemically synthesized
ctggatttcaggggagtggg

SEQ ID NO: 33360 - DNA, 20 bp, Artificial Sequence
  chemically synthesized
tggatttcaggggagtgggc

SEQ ID NO: 33361 - DNA, 20 bp, Artificial Sequence
  chemically synthesized
ggatttcaggggagtgggca

SEQ ID NO: 33362 - DNA, 20 bp, Artificial Sequence
  chemically synthesized
ttcaggggagtgggcagggc

SEQ ID NO: 33363 - DNA, 20 bp, Artificial Sequence
  chemically synthesized
tcaggggagtgggcagggct

SEQ ID NO: 33364 - DNA, 20 bp, Artificial Sequence
  chemically synthesized
caggggagtgggcagggcta

SEQ ID NO: 33365 - DNA, 20 bp, Artificial Sequence
  chemically synthesized
aggggagtgggcagggctag

SEQ ID NO: 33366 - DNA, 20 bp, Artificial Sequence
  chemically synthesized
agtgggcagggctaggggaa

SEQ ID NO: 33367 - DNA, 20 bp, Artificial Sequence
  chemically synthesized
agggctaggggaatagaact

SEQ ID NO: 33368 - DNA, 20 bp, Artificial Sequence
  chemically synthesized
gggctaggggaatagaactg

SEQ ID NO: 33369 - DNA, 20 bp, Artificial Sequence
  chemically synthesized
ggctaggggaatagaactga

SEQ ID NO: 33370 - DNA, 20 bp, Artificial Sequence
  chemically synthesized
agaactgagggtcatgatgt

SEQ ID NO: 33371 - DNA, 20 bp, Artificial Sequence
  chemically synthesized
actgagggtcatgatgtcag

SEQ ID NO: 33372 - DNA, 20 bp, Artificial Sequence
  chemically synthesized
gagggtcatgatgtcagtgg

SEQ ID NO: 33373 - DNA, 20 bp, Artificial Sequence
  chemically synthesized
agggtcatgatgtcagtggt

SEQ ID NO: 33374 - DNA, 20 bp, Artificial Sequence
  chemically synthesized
ggtcatgatgtcagtggtag

SEQ ID NO: 33375 - DNA, 20 bp, Artificial Sequence
  chemically synthesized
gatgtcagtggtaggagttg

SEQ ID NO: 33376 - DNA, 20 bp, Artificial Sequence
  chemically synthesized
agtggtaggagttgaagtct

SEQ ID NO: 33377 - DNA, 20 bp, Artificial Sequence
  chemically synthesized
ggtaggagttgaagtcttgg

SEQ ID NO: 33378 - DNA, 20 bp, Artificial Sequence
  chemically synthesized
ggagttgaagtcttggaaga

SEQ ID NO: 33379 - DNA, 20 bp, Artificial Sequence
  chemically synthesized
agttgaagtcttggaagaaa

SEQ ID NO: 33380 - DNA, 20 bp, Artificial Sequence
  chemically synthesized
tgaagtcttggaagaaagag

SEQ ID NO: 33381 - DNA, 20 bp, Artificial Sequence
  chemically synthesized
gtcttggaagaaagagtaga

SEQ ID NO: 33382 - DNA, 20 bp, Artificial Sequence
  chemically synthesized
ttttctgatgaacattctat

SEQ ID NO: 33383 - DNA, 20 bp, Artificial Sequence
  chemically synthesized
tttctgatgaacattctatg

SEQ ID NO: 33384 - DNA, 20 bp, Artificial Sequence
  chemically synthesized
ctgatgaacattctatgagg

SEQ ID NO: 33385 - DNA, 20 bp, Artificial Sequence
  chemically synthesized
gaacattctatgaggaagtt

SEQ ID NO: 33386 - DNA, 20 bp, Artificial Sequence
  chemically synthesized
cattctatgaggaagttcag

SEQ ID NO: 33387 - DNA, 20 bp, Artificial Sequence
  chemically synthesized
ttctatgaggaagttcagca

SEQ ID NO: 33388 - DNA, 20 bp, Artificial Sequence
  chemically synthesized
tctatgaggaagttcagcag

SEQ ID NO: 33389 - DNA, 20 bp, Artificial Sequence
  chemically synthesized
tgaggaagttcagcagaggt

SEQ ID NO: 33390 - DNA, 20 bp, Artificial Sequence
  chemically synthesized
cctatcctgctgtcatgttt

SEQ ID NO: 33391 - DNA, 20 bp, Artificial Sequence
  chemically synthesized
tttaagcaacttattatgca

SEQ ID NO: 33392 - DNA, 20 bp, Artificial Sequence
  chemically synthesized
caacttattatgcacagcac

SEQ ID NO: 33393 - DNA, 20 bp, Artificial Sequence
  chemically synthesized
aacttattatgcacagcacc

SEQ ID NO: 33394 - DNA, 20 bp, Artificial Sequence
  chemically synthesized
catcaatgtaaattgcatgc

SEQ ID NO: 33395 - DNA, 20 bp, Artificial Sequence
  chemically synthesized
tgcatgccagtctttgctct

SEQ ID NO: 33396 - DNA, 20 bp, Artificial Sequence
  chemically synthesized
agtctttgctctcagtttca

SEQ ID NO: 33397 - DNA, 20 bp, Artificial Sequence
  chemically synthesized
gtctttgctctcagtttcaa

SEQ ID NO: 33398 - DNA, 20 bp, Artificial Sequence
  chemically synthesized
cctgctgtctaatctttaca

SEQ ID NO: 33399 - DNA, 20 bp, Artificial Sequence
  chemically synthesized
ctgtctaatctttacaaaga

SEQ ID NO: 33400 - DNA, 20 bp, Artificial Sequence
  chemically synthesized
tgtctaatctttacaaagaa

SEQ ID NO: 33401 - DNA, 20 bp, Artificial Sequence
  chemically synthesized
ttacaaagaaaggttaactc

SEQ ID NO: 33402 - DNA, 20 bp, Artificial Sequence
  chemically synthesized
acaaagaaaggttaactcca

SEQ ID NO: 33403 - DNA, 20 bp, Artificial Sequence
  chemically synthesized
caaagaaaggttaactccag

SEQ ID NO: 33404 - DNA, 20 bp, Artificial Sequence
  chemically synthesized
gaaaggttaactccagaggt

SEQ ID NO: 33405 - DNA, 20 bp, Artificial Sequence
  chemically synthesized
aaaggttaactccagaggtc

SEQ ID NO: 33406 - DNA, 20 bp, Artificial Sequence
  chemically synthesized
agaggtcaggaatctgaaca

SEQ ID NO: 33407 - DNA, 20 bp, Artificial Sequence
  chemically synthesized
ggaatctgaacacagaaaac

SEQ ID NO: 33408 - DNA, 20 bp, Artificial Sequence
  chemically synthesized
ttaatgaatatgtcaacaca

SEQ ID NO: 33409 - DNA, 20 bp, Artificial Sequence
  chemically synthesized
atgaaatcacatttacacaa

SEQ ID NO: 33410 - DNA, 20 bp, Artificial Sequence
  chemically synthesized
catttacacaaaagtacaac

SEQ ID NO: 33411 - DNA, 20 bp, Artificial Sequence
  chemically synthesized
atttacacaaaagtacaact

SEQ ID NO: 33412 - DNA, 20 bp, Artificial Sequence
  chemically synthesized
tttacacaaaagtacaactg

SEQ ID NO: 33413 - DNA, 20 bp, Artificial Sequence
  chemically synthesized
cacaaaagtacaactggggt

SEQ ID NO: 33414 - DNA, 20 bp, Artificial Sequence
  chemically synthesized
actggggtaagaaaattcaa

SEQ ID NO: 33415 - DNA, 20 bp, Artificial Sequence
  chemically synthesized
gtaagaaaattcaaaagata

SEQ ID NO: 33416 - DNA, 20 bp, Artificial Sequence
  chemically synthesized
atgaaataccctatgtattt

SEQ ID NO: 33417 - DNA, 20 bp, Artificial Sequence
  chemically synthesized
aataccctatgtatttgagt

SEQ ID NO: 33418 - DNA, 20 bp, Artificial Sequence
  chemically synthesized
atgtatttgagtaagttgct

SEQ ID NO: 33419 - DNA, 20 bp, Artificial Sequence
  chemically synthesized
tgcttagcttctcccaacct

SEQ ID NO: 33420 - DNA, 20 bp, Artificial Sequence
  chemically synthesized
gtttcctcatttctaaaacg

SEQ ID NO: 33421 - DNA, 20 bp, Artificial Sequence
  chemically synthesized
cgaagaacttgcttaatatt

SEQ ID NO: 33422 - DNA, 20 bp, Artificial Sequence
  chemically synthesized
gaagaacttgcttaatattc

SEQ ID NO: 33423 - DNA, 20 bp, Artificial Sequence
  chemically synthesized
cttgcttaatattcaggctc

SEQ ID NO: 33424 - DNA, 20 bp, Artificial Sequence
  chemically synthesized
ttgcttaatattcaggctct

SEQ ID NO: 33425 - DNA, 20 bp, Artificial Sequence
  chemically synthesized
ccaccaaatccttgattcac

SEQ ID NO: 33426 - DNA, 20 bp, Artificial Sequence
  chemically synthesized
aatccttgattcactggctc

SEQ ID NO: 33427 - DNA, 20 bp, Artificial Sequence
  chemically synthesized
atccttgattcactggctct

SEQ ID NO: 33428 - DNA, 20 bp, Artificial Sequence
  chemically synthesized
gctctgggtctgtatgtaac

SEQ ID NO: 33429 - DNA, 20 bp, Artificial Sequence
  chemically synthesized
gtctgtatgtaacaagcttc

SEQ ID NO: 33430 - DNA, 20 bp, Artificial Sequence
  chemically synthesized
ctgtatgtaacaagcttctg

SEQ ID NO: 33431 - DNA, 20 bp, Artificial Sequence
  chemically synthesized
tctggagtgattctaatgat

SEQ ID NO: 33432 - DNA, 20 bp, Artificial Sequence
  chemically synthesized
gagtgattctaatgattagc

SEQ ID NO: 33433 - DNA, 20 bp, Artificial Sequence
  chemically synthesized
gtgattctaatgattagcca

SEQ ID NO: 33434 - DNA, 20 bp, Artificial Sequence
  chemically synthesized
ttctaatgattagccagaga

SEQ ID NO: 33435 - DNA, 20 bp, Artificial Sequence
  chemically synthesized
tctaatgattagccagagac

SEQ ID NO: 33436 - DNA, 20 bp, Artificial Sequence
  chemically synthesized
aaaaattaccacaaatttat

SEQ ID NO: 33437 - DNA, 20 bp, Artificial Sequence
  chemically synthesized
aacacaaatgtattatcttg

SEQ ID NO: 33438 - DNA, 20 bp, Artificial Sequence
  chemically synthesized
aatgtattatcttgaagttg

SEQ ID NO: 33439 - DNA, 20 bp, Artificial Sequence
  chemically synthesized
tgtattatcttgaagttgtg

SEQ ID NO: 33440 - DNA, 20 bp, Artificial Sequence
  chemically synthesized
gtattatcttgaagttgtgg

SEQ ID NO: 33441 - DNA, 20 bp, Artificial Sequence
  chemically synthesized
tatcttgaagttgtggaggt

SEQ ID NO: 33442 - DNA, 20 bp, Artificial Sequence
  chemically synthesized
cttgaagttgtggaggtcag

SEQ ID NO: 33443 - DNA, 20 bp, Artificial Sequence
  chemically synthesized
ggaggtcagaagtctgaaat

SEQ ID NO: 33444 - DNA, 20 bp, Artificial Sequence
  chemically synthesized
aagtctgaaatcggtttcac

SEQ ID NO: 33445 - DNA, 20 bp, Artificial Sequence
  chemically synthesized
agtctgaaatcggtttcact

SEQ ID NO: 33446 - DNA, 20 bp, Artificial Sequence
  chemically synthesized
aaatcggtttcactgggcta

SEQ ID NO: 33447 - DNA, 20 bp, Artificial Sequence
  chemically synthesized
ggtttcactgggctaaagtc

SEQ ID NO: 33448 - DNA, 20 bp, Artificial Sequence
  chemically synthesized
gtttcactgggctaaagtcg

SEQ ID NO: 33449 - DNA, 20 bp, Artificial Sequence
  chemically synthesized
ctgggctaaagtcgaggtgt

SEQ ID NO: 33450 - DNA, 20 bp, Artificial Sequence
  chemically synthesized
ctaaagtcgaggtgtcagtg

SEQ ID NO: 33451 - DNA, 20 bp, Artificial Sequence
  chemically synthesized
gtcagtgtggctgtttcttc

SEQ ID NO: 33452 - DNA, 20 bp, Artificial Sequence
  chemically synthesized
cagtgtggctgtttcttctg

SEQ ID NO: 33453 - DNA, 20 bp, Artificial Sequence
  chemically synthesized
gtttcttctggagactctat

SEQ ID NO: 33454 - DNA, 20 bp, Artificial Sequence
  chemically synthesized
ttcttctggagactctatga

SEQ ID NO: 33455 - DNA, 20 bp, Artificial Sequence
  chemically synthesized
gtgttttcctgccttttcca

SEQ ID NO: 33456 - DNA, 20 bp, Artificial Sequence
  chemically synthesized
atggattctgtttcctcttc

SEQ ID NO: 33457 - DNA, 20 bp, Artificial Sequence
  chemically synthesized
ggattctgtttcctcttcta

SEQ ID NO: 33458 - DNA, 20 bp, Artificial Sequence
  chemically synthesized
gattctgtttcctcttctag

SEQ ID NO: 33459 - DNA, 20 bp, Artificial Sequence
  chemically synthesized
tagaggctacccacattcct

SEQ ID NO: 33460 - DNA, 20 bp, Artificial Sequence
  chemically synthesized
tacccacattccttggtttg

SEQ ID NO: 33461 - DNA, 20 bp, Artificial Sequence
  chemically synthesized
gtcacattttctcctcttat

SEQ ID NO: 33462 - DNA, 20 bp, Artificial Sequence
  chemically synthesized
atgacacttgtgattacatt

SEQ ID NO: 33463 - DNA, 20 bp, Artificial Sequence
  chemically synthesized
tgacacttgtgattacattt

SEQ ID NO: 33464 - DNA, 20 bp, Artificial Sequence
  chemically synthesized
ttaggatacacccaaataat

SEQ ID NO: 33465 - DNA, 20 bp, Artificial Sequence
  chemically synthesized
taggatacacccaaataatt

SEQ ID NO: 33466 - DNA, 20 bp, Artificial Sequence
  chemically synthesized
ttaggatatctccccatccc

SEQ ID NO: 33467 - DNA, 20 bp, Artificial Sequence
  chemically synthesized
atccttaattatatatgcaa

SEQ ID NO: 33468 - DNA, 20 bp, Artificial Sequence
  chemically synthesized
tatatatgcaaaagtctgtt

SEQ ID NO: 33469 - DNA, 20 bp, Artificial Sequence
  chemically synthesized
tatgcaaaagtctgtttggc

SEQ ID NO: 33470 - DNA, 20 bp, Artificial Sequence
  chemically synthesized
aaaagtctgtttggctagaa

SEQ ID NO: 33471 - DNA, 20 bp, Artificial Sequence
  chemically synthesized
gctagaaaagataatactca

SEQ ID NO: 33472 - DNA, 20 bp, Artificial Sequence
  chemically synthesized
ctagaaaagataatactcac

SEQ ID NO: 33473 - DNA, 20 bp, Artificial Sequence
  chemically synthesized
aagataatactcacaggttt

SEQ ID NO: 33474 - DNA, 20 bp, Artificial Sequence
  chemically synthesized
agataatactcacaggtttc

SEQ ID NO: 33475 - DNA, 20 bp, Artificial Sequence
  chemically synthesized
gataatactcacaggtttca

SEQ ID NO: 33476 - DNA, 20 bp, Artificial Sequence
  chemically synthesized
ataatactcacaggtttcag

SEQ ID NO: 33477 - DNA, 20 bp, Artificial Sequence
  chemically synthesized
actcacaggtttcaggggtt

SEQ ID NO: 33478 - DNA, 20 bp, Artificial Sequence
  chemically synthesized
gttaagccatacatatcttt

SEQ ID NO: 33479 - DNA, 20 bp, Artificial Sequence
  chemically synthesized
taagccatacatatctttca

SEQ ID NO: 33480 - DNA, 20 bp, Artificial Sequence
  chemically synthesized
ccatacatatctttcagagt

SEQ ID NO: 33481 - DNA, 20 bp, Artificial Sequence
  chemically synthesized
tatctttcagagtgagccat

SEQ ID NO: 33482 - DNA, 20 bp, Artificial Sequence
  chemically synthesized
gtgagccattagccattatt

SEQ ID NO: 33483 - DNA, 20 bp, Artificial Sequence
  chemically synthesized
agcctactgcgataatgtgc

SEQ ID NO: 33484 - DNA, 20 bp, Artificial Sequence
  chemically synthesized
ctatgttctatgttcccatc

SEQ ID NO: 33485 - DNA, 20 bp, Artificial Sequence
  chemically synthesized
tatgttctatgttcccatca

SEQ ID NO: 33486 - DNA, 20 bp, Artificial Sequence
  chemically synthesized
atgttcccatcaaggttaat

SEQ ID NO: 33487 - DNA, 20 bp, Artificial Sequence
  chemically synthesized
tcaaggttaattagaaatat

SEQ ID NO: 33488 - DNA, 20 bp, Artificial Sequence
  chemically synthesized
aatattagactctttttcca

SEQ ID NO: 33489 - DNA, 20 bp, Artificial Sequence
  chemically synthesized
ttccacagaaaaaaaaaatg

SEQ ID NO: 33490 - DNA, 20 bp, Artificial Sequence
  chemically synthesized
cacagaaaaaaaaaatgtag

SEQ ID NO: 33491 - DNA, 20 bp, Artificial Sequence
  chemically synthesized
agaaaaaaaaaatgtagcag

SEQ ID NO: 33492 - DNA, 20 bp, Artificial Sequence
  chemically synthesized
ctctctctttccttcatgcc

SEQ ID NO: 33493 - DNA, 20 bp, Artificial Sequence
  chemically synthesized
ctctttccttcatgcccagt

SEQ ID NO: 33494 - DNA, 20 bp, Artificial Sequence
  chemically synthesized
ctttccttcatgcccagtaa

SEQ ID NO: 33495 - DNA, 20 bp, Artificial Sequence
  chemically synthesized
tttccttcatgcccagtaag

SEQ ID NO: 33496 - DNA, 20 bp, Artificial Sequence
  chemically synthesized
ccttcatgcccagtaagagg

SEQ ID NO: 33497 - DNA, 20 bp, Artificial Sequence
  chemically synthesized
catgcccagtaagaggaagt

SEQ ID NO: 33498 - DNA, 20 bp, Artificial Sequence
  chemically synthesized
atgcccagtaagaggaagtg

SEQ ID NO: 33499 - DNA, 20 bp, Artificial Sequence
  chemically synthesized
gcaccatctgttcatctcat

SEQ ID NO: 33500 - DNA, 20 bp, Artificial Sequence
  chemically synthesized
caccatctgttcatctcatc

SEQ ID NO: 33501 - DNA, 20 bp, Artificial Sequence
  chemically synthesized
tcatctcatcaggtgttacc

SEQ ID NO: 33502 - DNA, 20 bp, Artificial Sequence
  chemically synthesized
catcaggtgttacctagaat

SEQ ID NO: 33503 - DNA, 20 bp, Artificial Sequence
  chemically synthesized
tcaggtgttacctagaatca

SEQ ID NO: 33504 - DNA, 20 bp, Artificial Sequence
  chemically synthesized
gtgttacctagaatcagagt

SEQ ID NO: 33505 - DNA, 20 bp, Artificial Sequence
  chemically synthesized
tgttacctagaatcagagtc

SEQ ID NO: 33506 - DNA, 20 bp, Artificial Sequence
  chemically synthesized
ttacctagaatcagagtcag

SEQ ID NO: 33507 - DNA, 20 bp, Artificial Sequence
  chemically synthesized
ctagaatcagagtcaggaga

SEQ ID NO: 33508 - DNA, 20 bp, Artificial Sequence
  chemically synthesized
cctcataaaactactctgac

SEQ ID NO: 33509 - DNA, 20 bp, Artificial Sequence
  chemically synthesized
ctgacaagtaaaccatatcc

SEQ ID NO: 33510 - DNA, 20 bp, Artificial Sequence
  chemically synthesized
tgacaagtaaaccatatcct

SEQ ID NO: 33511 - DNA, 20 bp, Artificial Sequence
  chemically synthesized
gacaagtaaaccatatcctg

SEQ ID NO: 33512 - DNA, 20 bp, Artificial Sequence
  chemically synthesized
gtaaaccatatcctggggac

SEQ ID NO: 33513 - DNA, 20 bp, Artificial Sequence
  chemically synthesized
taaaccatatcctggggacc

SEQ ID NO: 33514 - DNA, 20 bp, Artificial Sequence
  chemically synthesized
ccatatcctggggaccaggt

SEQ ID NO: 33515 - DNA, 20 bp, Artificial Sequence
  chemically synthesized
gggaccaggtgagaattaaa

SEQ ID NO: 33516 - DNA, 20 bp, Artificial Sequence
  chemically synthesized
ttaaaaagctgtatactcat

SEQ ID NO: 33517 - DNA, 20 bp, Artificial Sequence
  chemically synthesized
tgtatactcataagctgcca

SEQ ID NO: 33518 - DNA, 20 bp, Artificial Sequence
  chemically synthesized
tatactcataagctgccaaa

SEQ ID NO: 33519 - DNA, 20 bp, Artificial Sequence
  chemically synthesized
ataagctgccaaagagctga

SEQ ID NO: 33520 - DNA, 20 bp, Artificial Sequence
  chemically synthesized
ccaaagagctgatggtactg

SEQ ID NO: 33521 - DNA, 20 bp, Artificial Sequence
  chemically synthesized
ctgatggtactgaagtcaca

SEQ ID NO: 33522 - DNA, 20 bp, Artificial Sequence
  chemically synthesized
gatggtactgaagtcacatg

SEQ ID NO: 33523 - DNA, 20 bp, Artificial Sequence
  chemically synthesized
tactgaagtcacatggagct

SEQ ID NO: 33524 - DNA, 20 bp, Artificial Sequence
  chemically synthesized
actgaagtcacatggagctc

SEQ ID NO: 33525 - DNA, 20 bp, Artificial Sequence
  chemically synthesized
caggaatttattcttgcatt

SEQ ID NO: 33526 - DNA, 20 bp, Artificial Sequence
  chemically synthesized
aatttattcttgcatttaga

SEQ ID NO: 33527 - DNA, 20 bp, Artificial Sequence
  chemically synthesized
atgcatataattctctcgaa

SEQ ID NO: 33528 - DNA, 20 bp, Artificial Sequence
  chemically synthesized
atgaaatcatatttttctgt

SEQ ID NO: 33529 - DNA, 20 bp, Artificial Sequence
  chemically synthesized
ttctgtcggatcaaattatt

SEQ ID NO: 33530 - DNA, 20 bp, Artificial Sequence
  chemically synthesized
ttattcagaaatccgaactg

SEQ ID NO: 33531 - DNA, 20 bp, Artificial Sequence
  chemically synthesized
caaacacacttgcttaatgt

SEQ ID NO: 33532 - DNA, 20 bp, Artificial Sequence
  chemically synthesized
tttaatcttatttttgtaca

SEQ ID NO: 33533 - DNA, 20 bp, Artificial Sequence
  chemically synthesized
gtacacagtatacttttaca

SEQ ID NO: 33534 - DNA, 20 bp, Artificial Sequence
  chemically synthesized
tacacagtatacttttacat

SEQ ID NO: 33535 - DNA, 20 bp, Artificial Sequence
  chemically synthesized
cttttacataggcactgaac

SEQ ID NO: 33536 - DNA, 20 bp, Artificial Sequence
  chemically synthesized
tacataggcactgaaccagc

SEQ ID NO: 33537 - DNA, 20 bp, Artificial Sequence
  chemically synthesized
accagctggaaatgaatgct

SEQ ID NO: 33538 - DNA, 20 bp, Artificial Sequence
  chemically synthesized
aatgaatgcttggattttcg

SEQ ID NO: 33539 - DNA, 20 bp, Artificial Sequence
  chemically synthesized
tggattttcgcagctgataa

SEQ ID NO: 33540 - DNA, 20 bp, Artificial Sequence
  chemically synthesized
attttcgcagctgataaaag

SEQ ID NO: 33541 - DNA, 20 bp, Artificial Sequence
  chemically synthesized
tttcgcagctgataaaagca

SEQ ID NO: 33542 - DNA, 20 bp, Artificial Sequence
  chemically synthesized
cagctgataaaagcagagtt

SEQ ID NO: 33543 - DNA, 20 bp, Artificial Sequence
  chemically synthesized
agagttcagattctgtcctt

SEQ ID NO: 33544 - DNA, 20 bp, Artificial Sequence
  chemically synthesized
ctgtccttgagctcaatgtc

SEQ ID NO: 33545 - DNA, 20 bp, Artificial Sequence
  chemically synthesized
gtccttgagctcaatgtctg

SEQ ID NO: 33546 - DNA, 20 bp, Artificial Sequence
  chemically synthesized
ttgagctcaatgtctggaga

SEQ ID NO: 33547 - DNA, 20 bp, Artificial Sequence
  chemically synthesized
agctcaatgtctggagaaag

SEQ ID NO: 33548 - DNA, 20 bp, Artificial Sequence
  chemically synthesized
tgaatactgcttccttaatt

SEQ ID NO: 33549 - DNA, 20 bp, Artificial Sequence
  chemically synthesized
ttccttaattcagatgcctt

SEQ ID NO: 33550 - DNA, 20 bp, Artificial Sequence
  chemically synthesized
attcagatgcctttggccgt

SEQ ID NO: 33551 - DNA, 20 bp, Artificial Sequence
  chemically synthesized
ttcagatgcctttggccgtg

SEQ ID NO: 33552 - DNA, 20 bp, Artificial Sequence
  chemically synthesized
tcagatgcctttggccgtga

SEQ ID NO: 33553 - DNA, 20 bp, Artificial Sequence
  chemically synthesized
cagatgcctttggccgtgag

SEQ ID NO: 33554 - DNA, 20 bp, Artificial Sequence
  chemically synthesized
gcctttggccgtgaggggca

SEQ ID NO: 33555 - DNA, 20 bp, Artificial Sequence
  chemically synthesized
gtgaggggcatggcatttta

SEQ ID NO: 33556 - DNA, 20 bp, Artificial Sequence
  chemically synthesized
aaactctgtactttttctct

SEQ ID NO: 33557 - DNA, 20 bp, Artificial Sequence
  chemically synthesized
aactctgtactttttctctc

SEQ ID NO: 33558 - DNA, 20 bp, Artificial Sequence
  chemically synthesized
actctgtactttttctctca

SEQ ID NO: 33559 - DNA, 20 bp, Artificial Sequence
  chemically synthesized
ctctgtactttttctctcag

SEQ ID NO: 33560 - DNA, 20 bp, Artificial Sequence
  chemically synthesized
tactttttctctcaggggat

SEQ ID NO: 33561 - DNA, 20 bp, Artificial Sequence
  chemically synthesized
agaaaaaccaattgatttga

SEQ ID NO: 33562 - DNA, 20 bp, Artificial Sequence
  chemically synthesized
caattgatttgatagtgact

SEQ ID NO: 33563 - DNA, 20 bp, Artificial Sequence
  chemically synthesized
ttgatttgatagtgactcag

SEQ ID NO: 33564 - DNA, 20 bp, Artificial Sequence
  chemically synthesized
gcagttttcaccttcctctt

SEQ ID NO: 33565 - DNA, 20 bp, Artificial Sequence
  chemically synthesized
cctctttagccaatgccctg

SEQ ID NO: 33566 - DNA, 20 bp, Artificial Sequence
  chemically synthesized
ttagccaatgccctgcagct

SEQ ID NO: 33567 - DNA, 20 bp, Artificial Sequence
  chemically synthesized
aatgccctgcagctaagatt

SEQ ID NO: 33568 - DNA, 20 bp, Artificial Sequence
  chemically synthesized
ctgcagctaagattgagaaa

SEQ ID NO: 33569 - DNA, 20 bp, Artificial Sequence
  chemically synthesized
ctaagattgagaaacggatt

SEQ ID NO: 33570 - DNA, 20 bp, Artificial Sequence
  chemically synthesized
gattcagaactcacacctct

SEQ ID NO: 33571 - DNA, 20 bp, Artificial Sequence
  chemically synthesized
aactcacacctcttggtgct

SEQ ID NO: 33572 - DNA, 20 bp, Artificial Sequence
  chemically synthesized
tcacacctcttggtgcttgg

SEQ ID NO: 33573 - DNA, 20 bp, Artificial Sequence
  chemically synthesized
gtggctcccttccaaaccat

SEQ ID NO: 33574 - DNA, 20 bp, Artificial Sequence
  chemically synthesized
actttctttcctatttttta

SEQ ID NO: 33575 - DNA, 20 bp, Artificial Sequence
  chemically synthesized
ctttcctattttttaaagca

SEQ ID NO: 33576 - DNA, 20 bp, Artificial Sequence
  chemically synthesized
tttaaagcacagtctgaatc

SEQ ID NO: 33577 - DNA, 20 bp, Artificial Sequence
  chemically synthesized
acagtctgaatcaagtgctt

SEQ ID NO: 33578 - DNA, 20 bp, Artificial Sequence
  chemically synthesized
ataaccctgaaccctcttct

SEQ ID NO: 33579 - DNA, 20 bp, Artificial Sequence
  chemically synthesized
taaccctgaaccctcttcta

SEQ ID NO: 33580 - DNA, 20 bp, Artificial Sequence
  chemically synthesized
gaaccctcttctaaggccac

SEQ ID NO: 33581 - DNA, 20 bp, Artificial Sequence
  chemically synthesized
ttctaaggccaccagttaca

SEQ ID NO: 33582 - DNA, 20 bp, Artificial Sequence
  chemically synthesized
aggccaccagttacaaagaa

SEQ ID NO: 33583 - DNA, 20 bp, Artificial Sequence
  chemically synthesized
ggccaccagttacaaagaat

SEQ ID NO: 33584 - DNA, 20 bp, Artificial Sequence
  chemically synthesized
gccaccagttacaaagaatg

SEQ ID NO: 33585 - DNA, 20 bp, Artificial Sequence
  chemically synthesized
accagttacaaagaatgggg

SEQ ID NO: 33586 - DNA, 20 bp, Artificial Sequence
  chemically synthesized
ccagttacaaagaatgggga

SEQ ID NO: 33587 - DNA, 20 bp, Artificial Sequence
  chemically synthesized
aaagaatggggaaggttaat

SEQ ID NO: 33588 - DNA, 20 bp, Artificial Sequence
  chemically synthesized
aggttaatgagtaactccac

SEQ ID NO: 33589 - DNA, 20 bp, Artificial Sequence
  chemically synthesized
gtaactccaccagtgcctgc

SEQ ID NO: 33590 - DNA, 20 bp, Artificial Sequence
  chemically synthesized
ctccaccagtgcctgccaga

SEQ ID NO: 33591 - DNA, 20 bp, Artificial Sequence
  chemically synthesized
ccagtgcctgccagaaagct

SEQ ID NO: 33592 - DNA, 20 bp, Artificial Sequence
  chemically synthesized
cagaaagctcagctgtactc

SEQ ID NO: 33593 - DNA, 20 bp, Artificial Sequence
  chemically synthesized
cagccttccttcctctcttg

SEQ ID NO: 33594 - DNA, 20 bp, Artificial Sequence
  chemically synthesized
gccttccttcctctcttgca

SEQ ID NO: 33595 - DNA, 20 bp, Artificial Sequence
  chemically synthesized
cttccttcctctcttgcaga

SEQ ID NO: 33596 - DNA, 20 bp, Artificial Sequence
  chemically synthesized
tcttgcagagagaaacaatg

SEQ ID NO: 33597 - DNA, 20 bp, Artificial Sequence
  chemically synthesized
tgcagagagaaacaatgcgg

SEQ ID NO: 33598 - DNA, 20 bp, Artificial Sequence
  chemically synthesized
aacaatgcggcagttgaaca

SEQ ID NO: 33599 - DNA, 20 bp, Artificial Sequence
  chemically synthesized
tgcggcagttgaacaaagcg

SEQ ID NO: 33600 - DNA, 20 bp, Artificial Sequence
  chemically synthesized
gcggcagttgaacaaagcga

SEQ ID NO: 33601 - DNA, 20 bp, Artificial Sequence
  chemically synthesized
agcgaaggcactgtaatgcc

SEQ ID NO: 33602 - DNA, 20 bp, Artificial Sequence
  chemically synthesized
gaaggcactgtaatgcccag

SEQ ID NO: 33603 - DNA, 20 bp, Artificial Sequence
  chemically synthesized
actgtaatgcccagtggctt

SEQ ID NO: 33604 - DNA, 20 bp, Artificial Sequence
  chemically synthesized
atgcccagtggcttcagtca

SEQ ID NO: 33605 - DNA, 20 bp, Artificial Sequence
  chemically synthesized
tgcccagtggcttcagtcac

SEQ ID NO: 33606 - DNA, 20 bp, Artificial Sequence
  chemically synthesized
cagtggcttcagtcacaggc

SEQ ID NO: 33607 - DNA, 20 bp, Artificial Sequence
  chemically synthesized
tggtctaaaattccatttca

SEQ ID NO: 33608 - DNA, 20 bp, Artificial Sequence
  chemically synthesized
aattccatttcacagaattg

SEQ ID NO: 33609 - DNA, 20 bp, Artificial Sequence
  chemically synthesized
tcacagaattgaagataatt

SEQ ID NO: 33610 - DNA, 20 bp, Artificial Sequence
  chemically synthesized
cacagaattgaagataattt

SEQ ID NO: 33611 - DNA, 20 bp, Artificial Sequence
  chemically synthesized
acagaattgaagataatttg

SEQ ID NO: 33612 - DNA, 20 bp, Artificial Sequence
  chemically synthesized
ttggggttattaccaattct

SEQ ID NO: 33613 - DNA, 20 bp, Artificial Sequence
  chemically synthesized
gggttattaccaattctcag

SEQ ID NO: 33614 - DNA, 20 bp, Artificial Sequence
  chemically synthesized
ctcaaattcaatcccgttga

SEQ ID NO: 33615 - DNA, 20 bp, Artificial Sequence
  chemically synthesized
aattcaatcccgttgatggt

SEQ ID NO: 33616 - DNA, 20 bp, Artificial Sequence
  chemically synthesized
aatcccgttgatggtgagca

SEQ ID NO: 33617 - DNA, 20 bp, Artificial Sequence
  chemically synthesized
atcccgttgatggtgagcat

SEQ ID NO: 33618 - DNA, 20 bp, Artificial Sequence
  chemically synthesized
tcccgttgatggtgagcatg

SEQ ID NO: 33619 - DNA, 20 bp, Artificial Sequence
  chemically synthesized
gtgagcatggggttcatttt

SEQ ID NO: 33620 - DNA, 20 bp, Artificial Sequence
  chemically synthesized
gagcatggggttcattttga

SEQ ID NO: 33621 - DNA, 20 bp, Artificial Sequence
  chemically synthesized
catggggttcattttgagag

SEQ ID NO: 33622 - DNA, 20 bp, Artificial Sequence
  chemically synthesized
tcattttgagagtagaaaat

SEQ ID NO: 33623 - DNA, 20 bp, Artificial Sequence
  chemically synthesized
tgagagtagaaaattggatg

SEQ ID NO: 33624 - DNA, 20 bp, Artificial Sequence
  chemically synthesized
gagtagaaaattggatgcag

SEQ ID NO: 33625 - DNA, 20 bp, Artificial Sequence
  chemically synthesized
gtagaaaattggatgcagtg

SEQ ID NO: 33626 - DNA, 20 bp, Artificial Sequence
  chemically synthesized
aattggatgcagtggagaat

SEQ ID NO: 33627 - DNA, 20 bp, Artificial Sequence
  chemically synthesized
gcagtggagaatcagaatgt

SEQ ID NO: 33628 - DNA, 20 bp, Artificial Sequence
  chemically synthesized
tggagaatcagaatgttgga

SEQ ID NO: 33629 - DNA, 20 bp, Artificial Sequence
  chemically synthesized
tggtctctgccatttcccca

SEQ ID NO: 33630 - DNA, 20 bp, Artificial Sequence
  chemically synthesized
tgctgctgcttttaacaaat

SEQ ID NO: 33631 - DNA, 20 bp, Artificial Sequence
  chemically synthesized
taacaaatcagtatacaact

SEQ ID NO: 33632 - DNA, 20 bp, Artificial Sequence
  chemically synthesized
tttcaaatatacaaaatatt

SEQ ID NO: 33633 - DNA, 20 bp, Artificial Sequence
  chemically synthesized
tatacaaaatattgagtctg

SEQ ID NO: 33634 - DNA, 20 bp, Artificial Sequence
  chemically synthesized
atacaaaatattgagtctga

SEQ ID NO: 33635 - DNA, 20 bp, Artificial Sequence
  chemically synthesized
atattgagtctgaaggcaaa

SEQ ID NO: 33636 - DNA, 20 bp, Artificial Sequence
  chemically synthesized
ttttcacttccattgcttcc

SEQ ID NO: 33637 - DNA, 20 bp, Artificial Sequence
  chemically synthesized
tttcacttccattgcttcct

SEQ ID NO: 33638 - DNA, 20 bp, Artificial Sequence
  chemically synthesized
tctgatatttcttccaaata

SEQ ID NO: 33639 - DNA, 20 bp, Artificial Sequence
  chemically synthesized
ttccaaatacagactgttgt

SEQ ID NO: 33640 - DNA, 20 bp, Artificial Sequence
  chemically synthesized
ctgatcatcactcacacatc

SEQ ID NO: 33641 - DNA, 20 bp, Artificial Sequence
  chemically synthesized
tgatcatcactcacacatcc

SEQ ID NO: 33642 - DNA, 20 bp, Artificial Sequence
  chemically synthesized
tgttacatctccacgccact

SEQ ID NO: 33643 - DNA, 20 bp, Artificial Sequence
  chemically synthesized
atctccacgccactgagtat

SEQ ID NO: 33644 - DNA, 20 bp, Artificial Sequence
  chemically synthesized
tctccacgccactgagtatc

SEQ ID NO: 33645 - DNA, 20 bp, Artificial Sequence
  chemically synthesized
ctccacgccactgagtatca

SEQ ID NO: 33646 - DNA, 20 bp, Artificial Sequence
  chemically synthesized
aacctgccccaatattcacg

SEQ ID NO: 33647 - DNA, 20 bp, Artificial Sequence
  chemically synthesized
acctgccccaatattcacgt

SEQ ID NO: 33648 - DNA, 20 bp, Artificial Sequence
  chemically synthesized
ggttcttttctattttccct

SEQ ID NO: 33649 - DNA, 20 bp, Artificial Sequence
  chemically synthesized
tttctattttccctaagcgt

SEQ ID NO: 33650 - DNA, 20 bp, Artificial Sequence
  chemically synthesized
ccctaagcgtcggccaactt

SEQ ID NO: 33651 - DNA, 20 bp, Artificial Sequence
  chemically synthesized
gtcggccaactttagaaata

SEQ ID NO: 33652 - DNA, 20 bp, Artificial Sequence
  chemically synthesized
tcggccaactttagaaataa

SEQ ID NO: 33653 - DNA, 20 bp, Artificial Sequence
  chemically synthesized
cggccaactttagaaataaa

SEQ ID NO: 33654 - DNA, 20 bp, Artificial Sequence
  chemically synthesized
caactttagaaataaaggga

SEQ ID NO: 33655 - DNA, 20 bp, Artificial Sequence
  chemically synthesized
actttagaaataaagggaca

SEQ ID NO: 33656 - DNA, 20 bp, Artificial Sequence
  chemically synthesized
aataaagggacagagtacaa

SEQ ID NO: 33657 - DNA, 20 bp, Artificial Sequence
  chemically synthesized
taaagggacagagtacaaaa

SEQ ID NO: 33658 - DNA, 20 bp, Artificial Sequence
  chemically synthesized
aagggacagagtacaaaaga

SEQ ID NO: 33659 - DNA, 20 bp, Artificial Sequence
  chemically synthesized
tacaaaagagagaaatttta

SEQ ID NO: 33660 - DNA, 20 bp, Artificial Sequence
  chemically synthesized
aaagagagaaattttaaagc

SEQ ID NO: 33661 - DNA, 20 bp, Artificial Sequence
  chemically synthesized
aagagagaaattttaaagcc

SEQ ID NO: 33662 - DNA, 20 bp, Artificial Sequence
  chemically synthesized
aaattttaaagccgggcatc

SEQ ID NO: 33663 - DNA, 20 bp, Artificial Sequence
  chemically synthesized
aattttaaagccgggcatcc

SEQ ID NO: 33664 - DNA, 20 bp, Artificial Sequence
  chemically synthesized
attttaaagccgggcatccg

SEQ ID NO: 33665 - DNA, 20 bp, Artificial Sequence
  chemically synthesized
ttttaaagccgggcatccgg

SEQ ID NO: 33666 - DNA, 20 bp, Artificial Sequence
  chemically synthesized
ttaaagccgggcatccgggg

SEQ ID NO: 33667 - DNA, 20 bp, Artificial Sequence
  chemically synthesized
taaagccgggcatccggggg

SEQ ID NO: 33668 - DNA, 20 bp, Artificial Sequence
  chemically synthesized
ccgggggaggcatcacattt

SEQ ID NO: 33669 - DNA, 20 bp, Artificial Sequence
  chemically synthesized
ggggaggcatcacatttcgg

SEQ ID NO: 33670 - DNA, 20 bp, Artificial Sequence
  chemically synthesized
gggaggcatcacatttcggt

SEQ ID NO: 33671 - DNA, 20 bp, Artificial Sequence
  chemically synthesized
taggttccgtgatgccccac

SEQ ID NO: 33672 - DNA, 20 bp, Artificial Sequence
  chemically synthesized
gccccacaagccacaaaaac

SEQ ID NO: 33673 - DNA, 20 bp, Artificial Sequence
  chemically synthesized
cacaagccacaaaaaccagc

SEQ ID NO: 33674 - DNA, 20 bp, Artificial Sequence
  chemically synthesized
aaaaaccagcaagtttgtat

SEQ ID NO: 33675 - DNA, 20 bp, Artificial Sequence
  chemically synthesized
aaaaccagcaagtttgtatt

SEQ ID NO: 33676 - DNA, 20 bp, Artificial Sequence
  chemically synthesized
aaaccagcaagtttgtatta

SEQ ID NO: 33677 - DNA, 20 bp, Artificial Sequence
  chemically synthesized
ttgtattagggattttcaaa

SEQ ID NO: 33678 - DNA, 20 bp, Artificial Sequence
  chemically synthesized
tgtattagggattttcaaat

SEQ ID NO: 33679 - DNA, 20 bp, Artificial Sequence
  chemically synthesized
gtattagggattttcaaatg

SEQ ID NO: 33680 - DNA, 20 bp, Artificial Sequence
  chemically synthesized
attagggattttcaaatggg

SEQ ID NO: 33681 - DNA, 20 bp, Artificial Sequence
  chemically synthesized
ttagggattttcaaatgggg

SEQ ID NO: 33682 - DNA, 20 bp, Artificial Sequence
  chemically synthesized
gggattttcaaatggggagg

SEQ ID NO: 33683 - DNA, 20 bp, Artificial Sequence
  chemically synthesized
atggggaggcagtgtgcaaa

SEQ ID NO: 33684 - DNA, 20 bp, Artificial Sequence
  chemically synthesized
tggggaggcagtgtgcaaat

SEQ ID NO: 33685 - DNA, 20 bp, Artificial Sequence
  chemically synthesized
aggcagtgtgcaaataggtg

SEQ ID NO: 33686 - DNA, 20 bp, Artificial Sequence
  chemically synthesized
ggcagtgtgcaaataggtgt

SEQ ID NO: 33687 - DNA, 20 bp, Artificial Sequence
  chemically synthesized
gtgcaaataggtgtgggtca

SEQ ID NO: 33688 - DNA, 20 bp, Artificial Sequence
  chemically synthesized
aggtgtgggtcacagacatc

SEQ ID NO: 33689 - DNA, 20 bp, Artificial Sequence
  chemically synthesized
acagacatcaagtactttac

SEQ ID NO: 33690 - DNA, 20 bp, Artificial Sequence
  chemically synthesized
cagacatcaagtactttaca

SEQ ID NO: 33691 - DNA, 20 bp, Artificial Sequence
  chemically synthesized
tcaagtactttacaaggtaa

SEQ ID NO: 33692 - DNA, 20 bp, Artificial Sequence
  chemically synthesized
acaaggtaatagaatatcac

SEQ ID NO: 33693 - DNA, 20 bp, Artificial Sequence
  chemically synthesized
caaggtaatagaatatcaca

SEQ ID NO: 33694 - DNA, 20 bp, Artificial Sequence
  chemically synthesized
gtaatagaatatcacaaggc

SEQ ID NO: 33695 - DNA, 20 bp, Artificial Sequence
  chemically synthesized
atagaatatcacaaggcaag

SEQ ID NO: 33696 - DNA, 20 bp, Artificial Sequence
  chemically synthesized
agaatatcacaaggcaagtg

SEQ ID NO: 33697 - DNA, 20 bp, Artificial Sequence
  chemically synthesized
gaatatcacaaggcaagtgg

SEQ ID NO: 33698 - DNA, 20 bp, Artificial Sequence
  chemically synthesized
tatcacaaggcaagtggagg

SEQ ID NO: 33699 - DNA, 20 bp, Artificial Sequence
  chemically synthesized
atcacaaggcaagtggaggc

SEQ ID NO: 33700 - DNA, 20 bp, Artificial Sequence
  chemically synthesized
tcacaaggcaagtggaggca

SEQ ID NO: 33701 - DNA, 20 bp, Artificial Sequence
  chemically synthesized
aaggcaagtggaggcagggt

SEQ ID NO: 33702 - DNA, 20 bp, Artificial Sequence
  chemically synthesized
gtggaggcagggtgagatca

SEQ ID NO: 33703 - DNA, 20 bp, Artificial Sequence
  chemically synthesized
tggaggcagggtgagatcac

SEQ ID NO: 33704 - DNA, 20 bp, Artificial Sequence
  chemically synthesized
agggtgagatcacaggacca

SEQ ID NO: 33705 - DNA, 20 bp, Artificial Sequence
  chemically synthesized
gggtgagatcacaggaccac

SEQ ID NO: 33706 - DNA, 20 bp, Artificial Sequence
  chemically synthesized
gatcacaggaccacaggacc

SEQ ID NO: 33707 - DNA, 20 bp, Artificial Sequence
  chemically synthesized
atcacaggaccacaggaccg

SEQ ID NO: 33708 - DNA, 20 bp, Artificial Sequence
  chemically synthesized
cgaaattaaaattgctaatg

SEQ ID NO: 33709 - DNA, 20 bp, Artificial Sequence
  chemically synthesized
taaaattgctaatgaagttt

SEQ ID NO: 33710 - DNA, 20 bp, Artificial Sequence
  chemically synthesized
aaaattgctaatgaagtttc

SEQ ID NO: 33711 - DNA, 20 bp, Artificial Sequence
  chemically synthesized
tgtcattgataacatcttat

SEQ ID NO: 33712 - DNA, 20 bp, Artificial Sequence
  chemically synthesized
gtcattgataacatcttatc

SEQ ID NO: 33713 - DNA, 20 bp, Artificial Sequence
  chemically synthesized
cattgataacatcttatcag

SEQ ID NO: 33714 - DNA, 20 bp, Artificial Sequence
  chemically synthesized
gataacatcttatcaggaga

SEQ ID NO: 33715 - DNA, 20 bp, Artificial Sequence
  chemically synthesized
ataacatcttatcaggagac

SEQ ID NO: 33716 - DNA, 20 bp, Artificial Sequence
  chemically synthesized
taacatcttatcaggagaca

SEQ ID NO: 33717 - DNA, 20 bp, Artificial Sequence
  chemically synthesized
ttatcaggagacagggtttt

SEQ ID NO: 33718 - DNA, 20 bp, Artificial Sequence
  chemically synthesized
tatcaggagacagggttttt

SEQ ID NO: 33719 - DNA, 20 bp, Artificial Sequence
  chemically synthesized
acagggtttttaggatcaac

SEQ ID NO: 33720 - DNA, 20 bp, Artificial Sequence
  chemically synthesized
ctggtctgaccaaaatttat

SEQ ID NO: 33721 - DNA, 20 bp, Artificial Sequence
  chemically synthesized
tggtctgaccaaaatttatt

SEQ ID NO: 33722 - DNA, 20 bp, Artificial Sequence
  chemically synthesized
tctgaccaaaatttattagg

SEQ ID NO: 33723 - DNA, 20 bp, Artificial Sequence
  chemically synthesized
ctgaccaaaatttattaggc

SEQ ID NO: 33724 - DNA, 20 bp, Artificial Sequence
  chemically synthesized
gggaatttcctcttcctaat

SEQ ID NO: 33725 - DNA, 20 bp, Artificial Sequence
  chemically synthesized
tttcctcttcctaataagcc

SEQ ID NO: 33726 - DNA, 20 bp, Artificial Sequence
  chemically synthesized
ttcctcttcctaataagcct

SEQ ID NO: 33727 - DNA, 20 bp, Artificial Sequence
  chemically synthesized
cctcttcctaataagcctgg

SEQ ID NO: 33728 - DNA, 20 bp, Artificial Sequence
  chemically synthesized
taataagcctgggagcgctg

SEQ ID NO: 33729 - DNA, 20 bp, Artificial Sequence
  chemically synthesized
aataagcctgggagcgctgt

SEQ ID NO: 33730 - DNA, 20 bp, Artificial Sequence
  chemically synthesized
taagcctgggagcgctgtgg

SEQ ID NO: 33731 - DNA, 20 bp, Artificial Sequence
  chemically synthesized
ctgggagcgctgtgggagac

SEQ ID NO: 33732 - DNA, 20 bp, Artificial Sequence
  chemically synthesized
tgggagcgctgtgggagact

SEQ ID NO: 33733 - DNA, 20 bp, Artificial Sequence
  chemically synthesized
gggagcgctgtgggagactg

SEQ ID NO: 33734 - DNA, 20 bp, Artificial Sequence
  chemically synthesized
tggggtctatttcacccctg

SEQ ID NO: 33735 - DNA, 20 bp, Artificial Sequence
  chemically synthesized
acccctgcagtctcgaccat

SEQ ID NO: 33736 - DNA, 20 bp, Artificial Sequence
  chemically synthesized
ccctgcagtctcgaccataa

SEQ ID NO: 33737 - DNA, 20 bp, Artificial Sequence
  chemically synthesized
gcagtctcgaccataagaga

SEQ ID NO: 33738 - DNA, 20 bp, Artificial Sequence
  chemically synthesized
cagtctcgaccataagagac

SEQ ID NO: 33739 - DNA, 20 bp, Artificial Sequence
  chemically synthesized
ccataagagacaggcgcacc

SEQ ID NO: 33740 - DNA, 20 bp, Artificial Sequence
  chemically synthesized
ataagagacaggcgcacctg

SEQ ID NO: 33741 - DNA, 20 bp, Artificial Sequence
  chemically synthesized
taagagacaggcgcacctgg

SEQ ID NO: 33742 - DNA, 20 bp, Artificial Sequence
  chemically synthesized
aagagacaggcgcacctgga

SEQ ID NO: 33743 - DNA, 20 bp, Artificial Sequence
  chemically synthesized
agagacaggcgcacctggag

SEQ ID NO: 33744 - DNA, 20 bp, Artificial Sequence
  chemically synthesized
gagacaggcgcacctggagg

SEQ ID NO: 33745 - DNA, 20 bp, Artificial Sequence
  chemically synthesized
agacaggcgcacctggaggg

SEQ ID NO: 33746 - DNA, 20 bp, Artificial Sequence
  chemically synthesized
cctggaggggggctgtttat

SEQ ID NO: 33747 - DNA, 20 bp, Artificial Sequence
  chemically synthesized
gtttataagcctatacctcc

SEQ ID NO: 33748 - DNA, 20 bp, Artificial Sequence
  chemically synthesized
ctggctcgtattctctttct

SEQ ID NO: 33749 - DNA, 20 bp, Artificial Sequence
  chemically synthesized
tggctcgtattctctttctc

SEQ ID NO: 33750 - DNA, 20 bp, Artificial Sequence
  chemically synthesized
ggctcgtattctctttctca

SEQ ID NO: 33751 - DNA, 20 bp, Artificial Sequence
  chemically synthesized
tctcagggatgttccatgct

SEQ ID NO: 33752 - DNA, 20 bp, Artificial Sequence
  chemically synthesized
ggatgttccatgctgagaaa

SEQ ID NO: 33753 - DNA, 20 bp, Artificial Sequence
  chemically synthesized
ccatgctgagaaaaagaatt

SEQ ID NO: 33754 - DNA, 20 bp, Artificial Sequence
  chemically synthesized
tttctcccatttgcttttga

SEQ ID NO: 33755 - DNA, 20 bp, Artificial Sequence
  chemically synthesized
ctcccatttgcttttgaaag

SEQ ID NO: 33756 - DNA, 20 bp, Artificial Sequence
  chemically synthesized
cccatttgcttttgaaagaa

SEQ ID NO: 33757 - DNA, 20 bp, Artificial Sequence
  chemically synthesized
cttttgaaagaagagaaata

SEQ ID NO: 33758 - DNA, 20 bp, Artificial Sequence
  chemically synthesized
aaatatggctctgttctgcc

SEQ ID NO: 33759 - DNA, 20 bp, Artificial Sequence
  chemically synthesized
ctctgttctgcctggctcac

SEQ ID NO: 33760 - DNA, 20 bp, Artificial Sequence
  chemically synthesized
tgttctgcctggctcaccag

SEQ ID NO: 33761 - DNA, 20 bp, Artificial Sequence
  chemically synthesized
ctgcctggctcaccagcagt

SEQ ID NO: 33762 - DNA, 20 bp, Artificial Sequence
  chemically synthesized
gcctggctcaccagcagtca

SEQ ID NO: 33763 - DNA, 20 bp, Artificial Sequence
  chemically synthesized
ctcaccagcagtcagagttt

SEQ ID NO: 33764 - DNA, 20 bp, Artificial Sequence
  chemically synthesized
tcaccagcagtcagagttta

SEQ ID NO: 33765 - DNA, 20 bp, Artificial Sequence
  chemically synthesized
tgttatcctgttcttttttc

SEQ ID NO: 33766 - DNA, 20 bp, Artificial Sequence
  chemically synthesized
gttatcctgttcttttttca

SEQ ID NO: 33767 - DNA, 20 bp, Artificial Sequence
  chemically synthesized
cacatgctgtacaatttgtg

SEQ ID NO: 33768 - DNA, 20 bp, Artificial Sequence
  chemically synthesized
tgcagttaatgcaattatta

SEQ ID NO: 33769 - DNA, 20 bp, Artificial Sequence
  chemically synthesized
gcagttaatgcaattattac

SEQ ID NO: 33770 - DNA, 20 bp, Artificial Sequence
  chemically synthesized
cagttaatgcaattattaca

SEQ ID NO: 33771 - DNA, 20 bp, Artificial Sequence
  chemically synthesized
tgcaattattacagggtcct

SEQ ID NO: 33772 - DNA, 20 bp, Artificial Sequence
  chemically synthesized
gcaattattacagggtcctg

SEQ ID NO: 33773 - DNA, 20 bp, Artificial Sequence
  chemically synthesized
gaggcaatatacatcctcct

SEQ ID NO: 33774 - DNA, 20 bp, Artificial Sequence
  chemically synthesized
tatacatcctcctcagctga

SEQ ID NO: 33775 - DNA, 20 bp, Artificial Sequence
  chemically synthesized
atacatcctcctcagctgac

SEQ ID NO: 33776 - DNA, 20 bp, Artificial Sequence
  chemically synthesized
cctcctcagctgacaggatt

SEQ ID NO: 33777 - DNA, 20 bp, Artificial Sequence
  chemically synthesized
tcctcagctgacaggattaa

SEQ ID NO: 33778 - DNA, 20 bp, Artificial Sequence
  chemically synthesized
ctgacaggattaagagatta

SEQ ID NO: 33779 - DNA, 20 bp, Artificial Sequence
  chemically synthesized
aggattaagagattaaagta

SEQ ID NO: 33780 - DNA, 20 bp, Artificial Sequence
  chemically synthesized
ttaagagattaaagtaaaga

SEQ ID NO: 33781 - DNA, 20 bp, Artificial Sequence
  chemically synthesized
taagagattaaagtaaagac

SEQ ID NO: 33782 - DNA, 20 bp, Artificial Sequence
  chemically synthesized
taaagacaggcataaatcac

SEQ ID NO: 33783 - DNA, 20 bp, Artificial Sequence
  chemically synthesized
aaagacaggcataaatcaca

SEQ ID NO: 33784 - DNA, 20 bp, Artificial Sequence
  chemically synthesized
taaatcacaaggatattgac

SEQ ID NO: 33785 - DNA, 20 bp, Artificial Sequence
  chemically synthesized
aaatcacaaggatattgact

SEQ ID NO: 33786 - DNA, 20 bp, Artificial Sequence
  chemically synthesized
aatcacaaggatattgactg

SEQ ID NO: 33787 - DNA, 20 bp, Artificial Sequence
  chemically synthesized
cacaaggatattgactgggg

SEQ ID NO: 33788 - DNA, 20 bp, Artificial Sequence
  chemically synthesized
atattgactggggaagtgat

SEQ ID NO: 33789 - DNA, 20 bp, Artificial Sequence
  chemically synthesized
aaatctttacaatttatgtt

SEQ ID NO: 33790 - DNA, 20 bp, Artificial Sequence
  chemically synthesized
atctttacaatttatgttta

SEQ ID NO: 33791 - DNA, 20 bp, Artificial Sequence
  chemically synthesized
caatttatgtttagagattg

SEQ ID NO: 33792 - DNA, 20 bp, Artificial Sequence
  chemically synthesized
tatgtttagagattgcagta

SEQ ID NO: 33793 - DNA, 20 bp, Artificial Sequence
  chemically synthesized
tttagagattgcagtaaaga

SEQ ID NO: 33794 - DNA, 20 bp, Artificial Sequence
  chemically synthesized
ttagagattgcagtaaagac

SEQ ID NO: 33795 - DNA, 20 bp, Artificial Sequence
  chemically synthesized
attgcagtaaagacaggcat

SEQ ID NO: 33796 - DNA, 20 bp, Artificial Sequence
  chemically synthesized
acaggcataagaaattacaa

SEQ ID NO: 33797 - DNA, 20 bp, Artificial Sequence
  chemically synthesized
aaattacaaaagtattaatt

SEQ ID NO: 33798 - DNA, 20 bp, Artificial Sequence
  chemically synthesized
aattacaaaagtattaattt

SEQ ID NO: 33799 - DNA, 20 bp, Artificial Sequence
  chemically synthesized
attacaaaagtattaatttg

SEQ ID NO: 33800 - DNA, 20 bp, Artificial Sequence
  chemically synthesized
caatccacgaacttctgcca

SEQ ID NO: 33801 - DNA, 20 bp, Artificial Sequence
  chemically synthesized
acgaacttctgccatggctt

SEQ ID NO: 33802 - DNA, 20 bp, Artificial Sequence
  chemically synthesized
cttcagctgatccctccgtt

SEQ ID NO: 33803 - DNA, 20 bp, Artificial Sequence
  chemically synthesized
tcagctgatccctccgtttg

SEQ ID NO: 33804 - DNA, 20 bp, Artificial Sequence
  chemically synthesized
gatccctccgtttggagtcc

SEQ ID NO: 33805 - DNA, 20 bp, Artificial Sequence
  chemically synthesized
ccagacttcccgcaacaact

SEQ ID NO: 33806 - DNA, 20 bp, Artificial Sequence
  chemically synthesized
cccgcaacaactgagaactc

SEQ ID NO: 33807 - DNA, 20 bp, Artificial Sequence
  chemically synthesized
cgcaacaactgagaactctg

SEQ ID NO: 33808 - DNA, 20 bp, Artificial Sequence
  chemically synthesized
gcaacaactgagaactctgg

SEQ ID NO: 33809 - DNA, 20 bp, Artificial Sequence
  chemically synthesized
caacaactgagaactctgga

SEQ ID NO: 33810 - DNA, 20 bp, Artificial Sequence
  chemically synthesized
ccacccttcttatatctctt

SEQ ID NO: 33811 - DNA, 20 bp, Artificial Sequence
  chemically synthesized
cacccttcttatatctctta

SEQ ID NO: 33812 - DNA, 20 bp, Artificial Sequence
  chemically synthesized
cccttcttatatctcttaag

SEQ ID NO: 33813 - DNA, 20 bp, Artificial Sequence
  chemically synthesized
atctcttaaggagctgtgtt

SEQ ID NO: 33814 - DNA, 20 bp, Artificial Sequence
  chemically synthesized
cttaaggagctgtgttcaga

SEQ ID NO: 33815 - DNA, 20 bp, Artificial Sequence
  chemically synthesized
atggttacatttcgcttgct

SEQ ID NO: 33816 - DNA, 20 bp, Artificial Sequence
  chemically synthesized
ttacatttcgcttgctgagc

SEQ ID NO: 33817 - DNA, 20 bp, Artificial Sequence
  chemically synthesized
agactgcattttcattatcc

SEQ ID NO: 33818 - DNA, 20 bp, Artificial Sequence
  chemically synthesized
gactgcattttcattatcct

SEQ ID NO: 33819 - DNA, 20 bp, Artificial Sequence
  chemically synthesized
tatcctgggctaaaatcaat

SEQ ID NO: 33820 - DNA, 20 bp, Artificial Sequence
  chemically synthesized
gctaaaatcaattggtattt

SEQ ID NO: 33821 - DNA, 20 bp, Artificial Sequence
  chemically synthesized
aaatcaattggtatttaagt

SEQ ID NO: 33822 - DNA, 20 bp, Artificial Sequence
  chemically synthesized
atcaattggtatttaagtta

SEQ ID NO: 33823 - DNA, 20 bp, Artificial Sequence
  chemically synthesized
ggtatttaagttagagcaaa

SEQ ID NO: 33824 - DNA, 20 bp, Artificial Sequence
  chemically synthesized
gtatttaagttagagcaaaa

SEQ ID NO: 33825 - DNA, 20 bp, Artificial Sequence
  chemically synthesized
tatttaagttagagcaaaaa

SEQ ID NO: 33826 - DNA, 20 bp, Artificial Sequence
  chemically synthesized
aagggttctaaccctattta

SEQ ID NO: 33827 - DNA, 20 bp, Artificial Sequence
  chemically synthesized
ggttctaaccctatttacag

SEQ ID NO: 33828 - DNA, 20 bp, Artificial Sequence
  chemically synthesized
cagcacacatacacttacat

SEQ ID NO: 33829 - DNA, 20 bp, Artificial Sequence
  chemically synthesized
acatacacttacattagaat

SEQ ID NO: 33830 - DNA, 20 bp, Artificial Sequence
  chemically synthesized
cttacattagaattggcttt

SEQ ID NO: 33831 - DNA, 20 bp, Artificial Sequence
  chemically synthesized
ttacattagaattggcttta

SEQ ID NO: 33832 - DNA, 20 bp, Artificial Sequence
  chemically synthesized
tacattagaattggctttaa

SEQ ID NO: 33833 - DNA, 20 bp, Artificial Sequence
  chemically synthesized
ttccactgattaccttctat

SEQ ID NO: 33834 - DNA, 20 bp, Artificial Sequence
  chemically synthesized
ctgattaccttctatgagcc

SEQ ID NO: 33835 - DNA, 20 bp, Artificial Sequence
  chemically synthesized
tctatgagccaagactgcca

SEQ ID NO: 33836 - DNA, 20 bp, Artificial Sequence
  chemically synthesized
agccaagactgccatagtct

SEQ ID NO: 33837 - DNA, 20 bp, Artificial Sequence
  chemically synthesized
ccatagtctcagccttcatg

SEQ ID NO: 33838 - DNA, 20 bp, Artificial Sequence
  chemically synthesized
ctcagccttcatgcagctta

SEQ ID NO: 33839 - DNA, 20 bp, Artificial Sequence
  chemically synthesized
tcagccttcatgcagcttat

SEQ ID NO: 33840 - DNA, 20 bp, Artificial Sequence
  chemically synthesized
ccttcatgcagcttataggc

SEQ ID NO: 33841 - DNA, 20 bp, Artificial Sequence
  chemically synthesized
cagcttataggctagcaaaa

SEQ ID NO: 33842 - DNA, 20 bp, Artificial Sequence
  chemically synthesized
ttataggctagcaaaaaagc

SEQ ID NO: 33843 - DNA, 20 bp, Artificial Sequence
  chemically synthesized
aggctagcaaaaaagccaga

SEQ ID NO: 33844 - DNA, 20 bp, Artificial Sequence
  chemically synthesized
aaaaaagccagacagtgcac

SEQ ID NO: 33845 - DNA, 20 bp, Artificial Sequence
  chemically synthesized
gacagtgcacaagaactcac

SEQ ID NO: 33846 - DNA, 20 bp, Artificial Sequence
  chemically synthesized
caagaactcacaagtgtgtt

SEQ ID NO: 33847 - DNA, 20 bp, Artificial Sequence
  chemically synthesized
acaagtgtgttgagtgttgc

SEQ ID NO: 33848 - DNA, 20 bp, Artificial Sequence
  chemically synthesized
aagtgtgttgagtgttgcaa

SEQ ID NO: 33849 - DNA, 20 bp, Artificial Sequence
  chemically synthesized
gtgttgagtgttgcaagagt

SEQ ID NO: 33850 - DNA, 20 bp, Artificial Sequence
  chemically synthesized
agtgttgcaagagtaagttt

SEQ ID NO: 33851 - DNA, 20 bp, Artificial Sequence
  chemically synthesized
gtgttgcaagagtaagtttc

SEQ ID NO: 33852 - DNA, 20 bp, Artificial Sequence
  chemically synthesized
tgttgcaagagtaagtttca

SEQ ID NO: 33853 - DNA, 20 bp, Artificial Sequence
  chemically synthesized
gttgcaagagtaagtttcag

SEQ ID NO: 33854 - DNA, 20 bp, Artificial Sequence
  chemically synthesized
ggggctctccatgacttacc

SEQ ID NO: 33855 - DNA, 20 bp, Artificial Sequence
  chemically synthesized
tctccatgacttacctggtt

SEQ ID NO: 33856 - DNA, 20 bp, Artificial Sequence
  chemically synthesized
ctttaactttttttttcctc

SEQ ID NO: 33857 - DNA, 20 bp, Artificial Sequence
  chemically synthesized
tttaactttttttttcctct

SEQ ID NO: 33858 - DNA, 20 bp, Artificial Sequence
  chemically synthesized
ttttttttcctctgggtgta

SEQ ID NO: 33859 - DNA, 20 bp, Artificial Sequence
  chemically synthesized
tttcctctgggtgtaaagtg

SEQ ID NO: 33860 - DNA, 20 bp, Artificial Sequence
  chemically synthesized
tcctctgggtgtaaagtgaa

SEQ ID NO: 33861 - DNA, 20 bp, Artificial Sequence
  chemically synthesized
ctgggtgtaaagtgaagaga

SEQ ID NO: 33862 - DNA, 20 bp, Artificial Sequence
  chemically synthesized
taaagtgaagagatggcaat

SEQ ID NO: 33863 - DNA, 20 bp, Artificial Sequence
  chemically synthesized
aagtgaagagatggcaatca

SEQ ID NO: 33864 - DNA, 20 bp, Artificial Sequence
  chemically synthesized
tgaagagatggcaatcagag

SEQ ID NO: 33865 - DNA, 20 bp, Artificial Sequence
  chemically synthesized
gaagagatggcaatcagagt

SEQ ID NO: 33866 - DNA, 20 bp, Artificial Sequence
  chemically synthesized
ttccattgtgtcattgtgaa

SEQ ID NO: 33867 - DNA, 20 bp, Artificial Sequence
  chemically synthesized
gtgtcattgtgaaaagatgc

SEQ ID NO: 33868 - DNA, 20 bp, Artificial Sequence
  chemically synthesized
tgtcattgtgaaaagatgct

SEQ ID NO: 33869 - DNA, 20 bp, Artificial Sequence
  chemically synthesized
attgtgaaaagatgctgggc

SEQ ID NO: 33870 - DNA, 20 bp, Artificial Sequence
  chemically synthesized
ctgggctggcgtgtctcctg

SEQ ID NO: 33871 - DNA, 20 bp, Artificial Sequence
  chemically synthesized
tgggctggcgtgtctcctga

SEQ ID NO: 33872 - DNA, 20 bp, Artificial Sequence
  chemically synthesized
ttcatgcattcgcacaaata

SEQ ID NO: 33873 - DNA, 20 bp, Artificial Sequence
  chemically synthesized
acaaatatagatgtgttcca

SEQ ID NO: 33874 - DNA, 20 bp, Artificial Sequence
  chemically synthesized
tatagatgtgttccatagat

SEQ ID NO: 33875 - DNA, 20 bp, Artificial Sequence
  chemically synthesized
atagatgtgttccatagatg

SEQ ID NO: 33876 - DNA, 20 bp, Artificial Sequence
  chemically synthesized
gatgtgttccatagatgagg

SEQ ID NO: 33877 - DNA, 20 bp, Artificial Sequence
  chemically synthesized
tgttccatagatgaggcaga

SEQ ID NO: 33878 - DNA, 20 bp, Artificial Sequence
  chemically synthesized
tccatagatgaggcagatag

SEQ ID NO: 33879 - DNA, 20 bp, Artificial Sequence
  chemically synthesized
catagatgaggcagatagca

SEQ ID NO: 33880 - DNA, 20 bp, Artificial Sequence
  chemically synthesized
atagatgaggcagatagcag

SEQ ID NO: 33881 - DNA, 20 bp, Artificial Sequence
  chemically synthesized
atagcagaggcttctgccta

SEQ ID NO: 33882 - DNA, 20 bp, Artificial Sequence
  chemically synthesized
cagaggcttctgcctacagc

SEQ ID NO: 33883 - DNA, 20 bp, Artificial Sequence
  chemically synthesized
agaggcttctgcctacagca

SEQ ID NO: 33884 - DNA, 20 bp, Artificial Sequence
  chemically synthesized
gcttctgcctacagcaaggc

SEQ ID NO: 33885 - DNA, 20 bp, Artificial Sequence
  chemically synthesized
tgcctacagcaaggctagtt

SEQ ID NO: 33886 - DNA, 20 bp, Artificial Sequence
  chemically synthesized
cctacagcaaggctagtttg

SEQ ID NO: 33887 - DNA, 20 bp, Artificial Sequence
  chemically synthesized
tacagcaaggctagtttgga

SEQ ID NO: 33888 - DNA, 20 bp, Artificial Sequence
  chemically synthesized
acagcaaggctagtttggag

SEQ ID NO: 33889 - DNA, 20 bp, Artificial Sequence
  chemically synthesized
cagcaaggctagtttggaga

SEQ ID NO: 33890 - DNA, 20 bp, Artificial Sequence
  chemically synthesized
tttggagagggttttgctgt

SEQ ID NO: 33891 - DNA, 20 bp, Artificial Sequence
  chemically synthesized
ttggagagggttttgctgtc

SEQ ID NO: 33892 - DNA, 20 bp, Artificial Sequence
  chemically synthesized
tggagagggttttgctgtca

SEQ ID NO: 33893 - DNA, 20 bp, Artificial Sequence
  chemically synthesized
gagggttttgctgtcagggt

SEQ ID NO: 33894 - DNA, 20 bp, Artificial Sequence
  chemically synthesized
tggacccacacacctcttca

SEQ ID NO: 33895 - DNA, 20 bp, Artificial Sequence
  chemically synthesized
atgctttttcttttttttcc

SEQ ID NO: 33896 - DNA, 20 bp, Artificial Sequence
  chemically synthesized
gctttttcttttttttccca

SEQ ID NO: 33897 - DNA, 20 bp, Artificial Sequence
  chemically synthesized
ttttttttcccagagtttga

SEQ ID NO: 33898 - DNA, 20 bp, Artificial Sequence
  chemically synthesized
tttttttcccagagtttgaa

SEQ ID NO: 33899 - DNA, 20 bp, Artificial Sequence
  chemically synthesized
ttttttcccagagtttgaaa

SEQ ID NO: 33900 - DNA, 20 bp, Artificial Sequence
  chemically synthesized
cccagagtttgaaagggaaa

SEQ ID NO: 33901 - DNA, 20 bp, Artificial Sequence
  chemically synthesized
cagagtttgaaagggaaatg

SEQ ID NO: 33902 - DNA, 20 bp, Artificial Sequence
  chemically synthesized
tgaaagggaaatggagtctc

SEQ ID NO: 33903 - DNA, 20 bp, Artificial Sequence
  chemically synthesized
gggaaatggagtctcaagtt

SEQ ID NO: 33904 - DNA, 20 bp, Artificial Sequence
  chemically synthesized
ggaaatggagtctcaagttc

SEQ ID NO: 33905 - DNA, 20 bp, Artificial Sequence
  chemically synthesized
gaaatggagtctcaagttca

SEQ ID NO: 33906 - DNA, 20 bp, Artificial Sequence
  chemically synthesized
aatggagtctcaagttcagg

SEQ ID NO: 33907 - DNA, 20 bp, Artificial Sequence
  chemically synthesized
atggagtctcaagttcaggg

SEQ ID NO: 33908 - DNA, 20 bp, Artificial Sequence
  chemically synthesized
tctcaagttcagggaggtta

SEQ ID NO: 33909 - DNA, 20 bp, Artificial Sequence
  chemically synthesized
agttcagggaggttacagtg

SEQ ID NO: 33910 - DNA, 20 bp, Artificial Sequence
  chemically synthesized
tacagtgtagacccacaaat

SEQ ID NO: 33911 - DNA, 20 bp, Artificial Sequence
  chemically synthesized
tgtagacccacaaatcagct

SEQ ID NO: 33912 - DNA, 20 bp, Artificial Sequence
  chemically synthesized
acccacaaatcagctaagta

SEQ ID NO: 33913 - DNA, 20 bp, Artificial Sequence
  chemically synthesized
caaatcagctaagtacagct

SEQ ID NO: 33914 - DNA, 20 bp, Artificial Sequence
  chemically synthesized
aaatcagctaagtacagcta

SEQ ID NO: 33915 - DNA, 20 bp, Artificial Sequence
  chemically synthesized
aatcagctaagtacagctaa

SEQ ID NO: 33916 - DNA, 20 bp, Artificial Sequence
  chemically synthesized
cagctaagtacagctaaggg

SEQ ID NO: 33917 - DNA, 20 bp, Artificial Sequence
  chemically synthesized
gctaagtacagctaagggtg

SEQ ID NO: 33918 - DNA, 20 bp, Artificial Sequence
  chemically synthesized
aagtacagctaagggtggag

SEQ ID NO: 33919 - DNA, 20 bp, Artificial Sequence
  chemically synthesized
ggagaagtctatgcaatatc

SEQ ID NO: 33920 - DNA, 20 bp, Artificial Sequence
  chemically synthesized
ccagcactcttctgattaat

SEQ ID NO: 33921 - DNA, 20 bp, Artificial Sequence
  chemically synthesized
gcactcttctgattaattag

SEQ ID NO: 33922 - DNA, 20 bp, Artificial Sequence
  chemically synthesized
ttagaagtctttaaaattca

SEQ ID NO: 33923 - DNA, 20 bp, Artificial Sequence
  chemically synthesized
ccctaaatgattcatatgtc

SEQ ID NO: 33924 - DNA, 20 bp, Artificial Sequence
  chemically synthesized
atgattcatatgtcaagaca

SEQ ID NO: 33925 - DNA, 20 bp, Artificial Sequence
  chemically synthesized
tcatatgtcaagacacagta

SEQ ID NO: 33926 - DNA, 20 bp, Artificial Sequence
  chemically synthesized
cacagtaaagatattatatg

SEQ ID NO: 33927 - DNA, 20 bp, Artificial Sequence
  chemically synthesized
tggaacatcatacacaaaca

SEQ ID NO: 33928 - DNA, 20 bp, Artificial Sequence
  chemically synthesized
ggaacatcatacacaaacat

SEQ ID NO: 33929 - DNA, 20 bp, Artificial Sequence
  chemically synthesized
tacacaaacataggtccata

SEQ ID NO: 33930 - DNA, 20 bp, Artificial Sequence
  chemically synthesized
ccatatagaaattcttacct

SEQ ID NO: 33931 - DNA, 20 bp, Artificial Sequence
  chemically synthesized
tgctctttaaatcctgctaa

SEQ ID NO: 33932 - DNA, 20 bp, Artificial Sequence
  chemically synthesized
tctttaaatcctgctaatgg

SEQ ID NO: 33933 - DNA, 20 bp, Artificial Sequence
  chemically synthesized
atttgtgtctttgtcaccta

SEQ ID NO: 33934 - DNA, 20 bp, Artificial Sequence
  chemically synthesized
tgtcacctacagtacatttc

SEQ ID NO: 33935 - DNA, 20 bp, Artificial Sequence
  chemically synthesized
ctacagtacatttctggatt

SEQ ID NO: 33936 - DNA, 20 bp, Artificial Sequence
  chemically synthesized
tacagtacatttctggattt

SEQ ID NO: 33937 - DNA, 20 bp, Artificial Sequence
  chemically synthesized
acatttctggatttgggaat

SEQ ID NO: 33938 - DNA, 20 bp, Artificial Sequence
  chemically synthesized
atttgggaatgagtgttctt

SEQ ID NO: 33939 - DNA, 20 bp, Artificial Sequence
  chemically synthesized
ttgggaatgagtgttcttca

SEQ ID NO: 33940 - DNA, 20 bp, Artificial Sequence
  chemically synthesized
tgggaatgagtgttcttcag

SEQ ID NO: 33941 - DNA, 20 bp, Artificial Sequence
  chemically synthesized
ttcagaggatcctcgctgcc

SEQ ID NO: 33942 - DNA, 20 bp, Artificial Sequence
  chemically synthesized
tcagaggatcctcgctgccc

SEQ ID NO: 33943 - DNA, 20 bp, Artificial Sequence
  chemically synthesized
tcgctgcccaggttccctgc

SEQ ID NO: 33944 - DNA, 20 bp, Artificial Sequence
  chemically synthesized
ctgcccaggttccctgccag

SEQ ID NO: 33945 - DNA, 20 bp, Artificial Sequence
  chemically synthesized
tgcccaggttccctgccaga

SEQ ID NO: 33946 - DNA, 20 bp, Artificial Sequence
  chemically synthesized
caggttccctgccagaagga

SEQ ID NO: 33947 - DNA, 20 bp, Artificial Sequence
  chemically synthesized
tggcagggaacctgggcagc

SEQ ID NO: 33948 - DNA, 20 bp, Artificial Sequence
  chemically synthesized
gacacaaatgccaccattag

SEQ ID NO: 33949 - DNA, 20 bp, Artificial Sequence
  chemically synthesized
aattggcagtttactaaggt

SEQ ID NO: 33950 - DNA, 20 bp, Artificial Sequence
  chemically synthesized
tctttactgtgtcttgacat

SEQ ID NO: 33951 - DNA, 20 bp, Artificial Sequence
  chemically synthesized
gggaagacaatatggtttct

SEQ ID NO: 33952 - DNA, 20 bp, Artificial Sequence
  chemically synthesized
aaagacttctaattaatcag

SEQ ID NO: 33953 - DNA, 20 bp, Artificial Sequence
  chemically synthesized
tctaattaatcagaagagtg

SEQ ID NO: 33954 - DNA, 20 bp, Artificial Sequence
  chemically synthesized
tagctgtacttagctgattt

SEQ ID NO: 33955 - DNA, 20 bp, Artificial Sequence
  chemically synthesized
aagcatctatgaagaggtgt

SEQ ID NO: 33956 - DNA, 20 bp, Artificial Sequence
  chemically synthesized
tggaacacatctatatttgt

SEQ ID NO: 33957 - DNA, 20 bp, Artificial Sequence
  chemically synthesized
tgaaaataaagtttaaagat

SEQ ID NO: 33958 - DNA, 20 bp, Artificial Sequence
  chemically synthesized
ccagaggaaaaaaaaagtta

SEQ ID NO: 33959 - DNA, 20 bp, Artificial Sequence
  chemically synthesized
ttgcaacactcaacacactt

SEQ ID NO: 33960 - DNA, 20 bp, Artificial Sequence
  chemically synthesized
agtggaaatttgtcgattga

SEQ ID NO: 33961 - DNA, 20 bp, Artificial Sequence
  chemically synthesized
tgtatgtgtgctgctgtaaa

SEQ ID NO: 33962 - DNA, 20 bp, Artificial Sequence
  chemically synthesized
aataccaattgattttagcc

SEQ ID NO: 33963 - DNA, 20 bp, Artificial Sequence
  chemically synthesized
agctccttaagagatataag

SEQ ID NO: 33964 - DNA, 20 bp, Artificial Sequence
  chemically synthesized
gagatataagaagggtggaa

SEQ ID NO: 33965 - DNA, 20 bp, Artificial Sequence
  chemically synthesized
aagaagggtggaagtgggtg

SEQ ID NO: 33966 - DNA, 20 bp, Artificial Sequence
  chemically synthesized
tgggtgaagggtaggccctc

SEQ ID NO: 33967 - DNA, 20 bp, Artificial Sequence
  chemically synthesized
aagtctgggactccaaacgg

SEQ ID NO: 33968 - DNA, 20 bp, Artificial Sequence
  chemically synthesized
tgaagccatggcagaagttc

SEQ ID NO: 33969 - DNA, 20 bp, Artificial Sequence
  chemically synthesized
tcttaatcctgtcagctgag

SEQ ID NO: 33970 - DNA, 20 bp, Artificial Sequence
  chemically synthesized
tggacaccttgaaaaaagaa

SEQ ID NO: 33971 - DNA, 20 bp, Artificial Sequence
  chemically synthesized
aggataacagcaattgttca

SEQ ID NO: 33972 - DNA, 20 bp, Artificial Sequence
  chemically synthesized
agcaaatgggagaaatatcg

SEQ ID NO: 33973 - DNA, 20 bp, Artificial Sequence
  chemically synthesized
catggaacatccctgagaaa

SEQ ID NO: 33974 - DNA, 20 bp, Artificial Sequence
  chemically synthesized
tctcttatggtcgagactgc

SEQ ID NO: 33975 - DNA, 20 bp, Artificial Sequence
  chemically synthesized
accgaaatgtgatgcctccc

SEQ ID NO: 33976 - DNA, 20 bp, Artificial Sequence
  chemically synthesized
gaaaatagaaaagaacctac

SEQ ID NO: 33977 - DNA, 20 bp, Artificial Sequence
  chemically synthesized
ggcgtggagatgtaacaagc

SEQ ID NO: 33978 - DNA, 20 bp, Artificial Sequence
  chemically synthesized
gatgtaacaagcctggatgt

SEQ ID NO: 33979 - DNA, 20 bp, Artificial Sequence
  chemically synthesized
atttggaagaaatatcagat

SEQ ID NO: 33980 - DNA, 20 bp, Artificial Sequence
  chemically synthesized
taaaagcagcagcatgcagt

SEQ ID NO: 33981 - DNA, 20 bp, Artificial Sequence
  chemically synthesized
aaccccatgctcaccatcaa

SEQ ID NO: 33982 - DNA, 20 bp, Artificial Sequence
  chemically synthesized
catgctcaccatcaacggga

SEQ ID NO: 33983 - DNA, 20 bp, Artificial Sequence
  chemically synthesized
gggattgaatttgagctgct

SEQ ID NO: 33984 - DNA, 20 bp, Artificial Sequence
  chemically synthesized
ttatcttcaattctgtgaaa

SEQ ID NO: 33985 - DNA, 20 bp, Artificial Sequence
  chemically synthesized
tgcaagagaggaaggaaggc

SEQ ID NO: 33986 - DNA, 20 bp, Artificial Sequence
  chemically synthesized
agctttctggcaggcactgg

SEQ ID NO: 33987 - DNA, 20 bp, Artificial Sequence
  chemically synthesized
tgtaactggtggccttagaa

SEQ ID NO: 33988 - DNA, 20 bp, Artificial Sequence
  chemically synthesized
ggtggccttagaagagggtt

SEQ ID NO: 33989 - DNA, 20 bp, Artificial Sequence
  chemically synthesized
cagggttatgtgtttggaac

SEQ ID NO: 33990 - DNA, 20 bp, Artificial Sequence
  chemically synthesized
gccaccaagcaccaagaggt

SEQ ID NO: 33991 - DNA, 20 bp, Artificial Sequence
  chemically synthesized
agcaccaagaggtgtgagtt

SEQ ID NO: 33992 - DNA, 20 bp, Artificial Sequence
  chemically synthesized
aaagaggaaggtgaaaactg

SEQ ID NO: 33993 - DNA, 20 bp, Artificial Sequence
  chemically synthesized
atcccctgagagaaaaagta

SEQ ID NO: 33994 - DNA, 20 bp, Artificial Sequence
  chemically synthesized
cccctcacggccaaaggcat

SEQ ID NO: 33995 - DNA, 20 bp, Artificial Sequence
  chemically synthesized
ccagacattgagctcaagga

SEQ ID NO: 33996 - DNA, 20 bp, Artificial Sequence
  chemically synthesized
gtttgtatgttttctacagt

SEQ ID NO: 33997 - DNA, 20 bp, Artificial Sequence
  chemically synthesized
gttttctacagttcggattt

SEQ ID NO: 33998 - DNA, 20 bp, Artificial Sequence
  chemically synthesized
atgatttcatttcttttcga

SEQ ID NO: 33999 - DNA, 20 bp, Artificial Sequence
  chemically synthesized
tatgcatactttctaaatgc

SEQ ID NO: 34000 - DNA, 20 bp, Artificial Sequence
  chemically synthesized
catcagctctttggcagctt

SEQ ID NO: 34001 - DNA, 20 bp, Artificial Sequence
  chemically synthesized
tttaattctcacctggtccc

SEQ ID NO: 34002 - DNA, 20 bp, Artificial Sequence
  chemically synthesized
ccaggatatggtttacttgt

SEQ ID NO: 34003 - DNA, 20 bp, Artificial Sequence
  chemically synthesized
tgaaggaaagagagagaagt

SEQ ID NO: 34004 - DNA, 20 bp, Artificial Sequence
  chemically synthesized
attttttttttctgtggaaa

SEQ ID NO: 34005 - DNA, 20 bp, Artificial Sequence
  chemically synthesized
ttgcacattatcgcagtagg

SEQ ID NO: 34006 - DNA, 20 bp, Artificial Sequence
  chemically synthesized
tggcttaacccctgaaacct

SEQ ID NO: 34007 - DNA, 20 bp, Artificial Sequence
  chemically synthesized
agacttttgcatatataatt

SEQ ID NO: 34008 - DNA, 20 bp, Artificial Sequence
  chemically synthesized
gcatatataattaaggatct

SEQ ID NO: 34009 - DNA, 20 bp, Artificial Sequence
  chemically synthesized
tggggagatatcctaattat

SEQ ID NO: 34010 - DNA, 20 bp, Artificial Sequence
  chemically synthesized
gaggaagaggctacaaacca

SEQ ID NO: 34011 - DNA, 20 bp, Artificial Sequence
  chemically synthesized
gaggctacaaaccaaggaat

SEQ ID NO: 34012 - DNA, 20 bp, Artificial Sequence
  chemically synthesized
gtagcctctagaagaggaaa

SEQ ID NO: 34013 - DNA, 20 bp, Artificial Sequence
  chemically synthesized
caggaaaacacaatctctca

SEQ ID NO: 34014 - DNA, 20 bp, Artificial Sequence
  chemically synthesized
gcaagaggaaatcagttacg

SEQ ID NO: 34015 - DNA, 20 bp, Artificial Sequence
  chemically synthesized
tcctgtctctggctaatcat

SEQ ID NO: 34016 - DNA, 20 bp, Artificial Sequence
  chemically synthesized
tacatacagacccagagcca

SEQ ID NO: 34017 - DNA, 20 bp, Artificial Sequence
  chemically synthesized
agacccagagccagtgaatc

SEQ ID NO: 34018 - DNA, 20 bp, Artificial Sequence
  chemically synthesized
ttggtggtggggcccagagc

SEQ ID NO: 34019 - DNA, 20 bp, Artificial Sequence
  chemically synthesized
aagcaacttactcaaataca

SEQ ID NO: 34020 - DNA, 20 bp, Artificial Sequence
  chemically synthesized
taattttattactttatctt

SEQ ID NO: 34021 - DNA, 20 bp, Artificial Sequence
  chemically synthesized
attatataatgtttattgat

SEQ ID NO: 34022 - DNA, 20 bp, Artificial Sequence
  chemically synthesized
tataatgtttattgattaga

SEQ ID NO: 34023 - DNA, 20 bp, Artificial Sequence
  chemically synthesized
gtgttcagattcctgacctc

SEQ ID NO: 34024 - DNA, 20 bp, Artificial Sequence
  chemically synthesized
agattagacagcaggcaggg

SEQ ID NO: 34025 - DNA, 20 bp, Artificial Sequence
  chemically synthesized
aagttgcttaaacatgacag

SEQ ID NO: 34026 - DNA, 20 bp, Artificial Sequence
  chemically synthesized
gcttaaacatgacagcagga

SEQ ID NO: 34027 - DNA, 20 bp, Artificial Sequence
  chemically synthesized
acctctgctgaacttcctca

SEQ ID NO: 34028 - DNA, 20 bp, Artificial Sequence
  chemically synthesized
tccataaatccaaccaccgc

SEQ ID NO: 34029 - DNA, 20 bp, Artificial Sequence
  chemically synthesized
caaatttggctgacacagtt

SEQ ID NO: 34030 - DNA, 20 bp, Artificial Sequence
  chemically synthesized
gcactagcacaaaatatttg

SEQ ID NO: 34031 - DNA, 20 bp, Artificial Sequence
  chemically synthesized
acaaaatatttgctgaatga

SEQ ID NO: 34032 - DNA, 20 bp, Artificial Sequence
  chemically synthesized
tatttgctgaatgaaagaat

SEQ ID NO: 34033 - DNA, 20 bp, Artificial Sequence
  chemically synthesized
caaagtcttttactccggtg

SEQ ID NO: 34034 - DNA, 20 bp, Artificial Sequence
  chemically synthesized
actccggtgtggagtgtttt

SEQ ID NO: 34035 - DNA, 20 bp, Artificial Sequence
  chemically synthesized
gaaacacctccccttaactg

SEQ ID NO: 34036 - DNA, 20 bp, Artificial Sequence
  chemically synthesized
ttcagggaagatgtctgttg

SEQ ID NO: 34037 - DNA, 20 bp, Artificial Sequence
  chemically synthesized
ctataccccagatttatttt

SEQ ID NO: 34038 - DNA, 20 bp, Artificial Sequence
  chemically synthesized
ccagatttattttgaggatt

SEQ ID NO: 34039 - DNA, 20 bp, Artificial Sequence
  chemically synthesized
attgcgtattactaaaaaga

SEQ ID NO: 34040 - DNA, 20 bp, Artificial Sequence
  chemically synthesized
caatgggaaggtgtcagagc

SEQ ID NO: 34041 - DNA, 20 bp, Artificial Sequence
  chemically synthesized
ccgtagtggaggggagctct

SEQ ID NO: 34042 - DNA, 20 bp, Artificial Sequence
  chemically synthesized
aattgaaatgaacaaaggca

SEQ ID NO: 34043 - DNA, 20 bp, Artificial Sequence
  chemically synthesized
acagggaagcctctgaacac

SEQ ID NO: 34044 - DNA, 20 bp, Artificial Sequence
  chemically synthesized
cttcaggaaacccaggccca

SEQ ID NO: 34045 - DNA, 20 bp, Artificial Sequence
  chemically synthesized
tttctccttcaaaccactct

SEQ ID NO: 34046 - DNA, 20 bp, Artificial Sequence
  chemically synthesized
gcgtcactcaaactagctga

SEQ ID NO: 34047 - DNA, 20 bp, Artificial Sequence
  chemically synthesized
taggcttatttcaaaaggca

SEQ ID NO: 34048 - DNA, 20 bp, Artificial Sequence
  chemically synthesized
agtgcctgctgtgtgtggtg

SEQ ID NO: 34049 - DNA, 20 bp, Artificial Sequence
  chemically synthesized
taggaaggaacagggcagtg

SEQ ID NO: 34050 - DNA, 20 bp, Artificial Sequence
  chemically synthesized
ctgccctgttccttcctagc

SEQ ID NO: 34051 - DNA, 20 bp, Artificial Sequence
  chemically synthesized
gcctgagtcaggactgagca

SEQ ID NO: 34052 - DNA, 20 bp, Artificial Sequence
  chemically synthesized
gaaataagcctacttttaac

SEQ ID NO: 34053 - DNA, 20 bp, Artificial Sequence
  chemically synthesized
gctggactttgtccctgtgt

SEQ ID NO: 34054 - DNA, 20 bp, Artificial Sequence
  chemically synthesized
agacaattctttcagctagt

SEQ ID NO: 34055 - DNA, 20 bp, Artificial Sequence
  chemically synthesized
cgcagtgaagcagtgggaac

SEQ ID NO: 34056 - DNA, 20 bp, Artificial Sequence
  chemically synthesized
agtgggaaccggaatatcca

SEQ ID NO: 34057 - DNA, 20 bp, Artificial Sequence
  chemically synthesized
tggctttatatcctctgggc

SEQ ID NO: 34058 - DNA, 20 bp, Artificial Sequence
  chemically synthesized
atagaggagagagaaaatgg

SEQ ID NO: 34059 - DNA, 20 bp, Artificial Sequence
  chemically synthesized
atggaagtttctgagaactt

SEQ ID NO: 34060 - DNA, 20 bp, Artificial Sequence
  chemically synthesized
ttctgagaacttcagggtat

SEQ ID NO: 34061 - DNA, 20 bp, Artificial Sequence
  chemically synthesized
ctatttagttaattaaggct

SEQ ID NO: 34062 - DNA, 20 bp, Artificial Sequence
  chemically synthesized
tacgcaattgaaaagtatgt

SEQ ID NO: 34063 - DNA, 20 bp, Artificial Sequence
  chemically synthesized
aggtgctaagcattttagct

SEQ ID NO: 34064 - DNA, 20 bp, Artificial Sequence
  chemically synthesized
cataatcctcaaaataaatc

SEQ ID NO: 34065 - DNA, 20 bp, Artificial Sequence
  chemically synthesized
atagatgacttgattagaag

SEQ ID NO: 34066 - DNA, 20 bp, Artificial Sequence
  chemically synthesized
tgattagaagcagggtatgt

SEQ ID NO: 34067 - DNA, 20 bp, Artificial Sequence
  chemically synthesized
gtatcttaaggcaaggaaaa

SEQ ID NO: 34068 - DNA, 20 bp, Artificial Sequence
  chemically synthesized
gcctagtgcccaggccaggc

SEQ ID NO: 34069 - DNA, 20 bp, Artificial Sequence
  chemically synthesized
ccccacaacagacatcttcc

SEQ ID NO: 34070 - DNA, 20 bp, Artificial Sequence
  chemically synthesized
acagacatcttccctgaatg

SEQ ID NO: 34071 - DNA, 20 bp, Artificial Sequence
  chemically synthesized
ctaatgccctctaactgatg

SEQ ID NO: 34072 - DNA, 20 bp, Artificial Sequence
  chemically synthesized
tctaactgatgctgagtttg

SEQ ID NO: 34073 - DNA, 20 bp, Artificial Sequence
  chemically synthesized
tcagttaaggggaggtgttt

SEQ ID NO: 34074 - DNA, 20 bp, Artificial Sequence
  chemically synthesized
gggaggtgtttctgagtttg

SEQ ID NO: 34075 - DNA, 20 bp, Artificial Sequence
  chemically synthesized
caaacaccttcctaattggt

SEQ ID NO: 34076 - DNA, 20 bp, Artificial Sequence
  chemically synthesized
atcctgaaaacactccacac

SEQ ID NO: 34077 - DNA, 20 bp, Artificial Sequence
  chemically synthesized
agattaatatcgtagatgaa

SEQ ID NO: 34078 - DNA, 20 bp, Artificial Sequence
  chemically synthesized
tgaactgagtctgggctagg

SEQ ID NO: 34079 - DNA, 20 bp, Artificial Sequence
  chemically synthesized
taaaggagcctgtacctaaa

SEQ ID NO: 34080 - DNA, 20 bp, Artificial Sequence
  chemically synthesized
actggcaaagtgaggaagga

SEQ ID NO: 34081 - DNA, 20 bp, Artificial Sequence
  chemically synthesized
gaaggacggggtctggaggg

SEQ ID NO: 34082 - DNA, 20 bp, Artificial Sequence
  chemically synthesized
gacggggtctggagggaaga

SEQ ID NO: 34083 - DNA, 20 bp, Artificial Sequence
  chemically synthesized
gtgcaaaggcacagcacata

SEQ ID NO: 34084 - DNA, 20 bp, Artificial Sequence
  chemically synthesized
tacagaatgcctgcatgctc

SEQ ID NO: 34085 - DNA, 20 bp, Artificial Sequence
  chemically synthesized
caaaactgtgtcagccaaat

SEQ ID NO: 34086 - DNA, 20 bp, Artificial Sequence
  chemically synthesized
ctgagatacccaggcggtgg

SEQ ID NO: 34087 - DNA, 20 bp, Artificial Sequence
  chemically synthesized
cccaggcggtggttggattt

SEQ ID NO: 34088 - DNA, 20 bp, Artificial Sequence
  chemically synthesized
cggtggttggatttatggat

SEQ ID NO: 34089 - DNA, 20 bp, Artificial Sequence
  chemically synthesized
tttatggatctggatttcag

SEQ ID NO: 34090 - DNA, 20 bp, Artificial Sequence
  chemically synthesized
aggggagtgggcagggctag

SEQ ID NO: 34091 - DNA, 20 bp, Artificial Sequence
  chemically synthesized
agggctaggggaatagaact

SEQ ID NO: 34092 - DNA, 20 bp, Artificial Sequence
  chemically synthesized
agggtcatgatgtcagtggt

SEQ ID NO: 34093 - DNA, 20 bp, Artificial Sequence
  chemically synthesized
ggagttgaagtcttggaaga

SEQ ID NO: 34094 - DNA, 20 bp, Artificial Sequence
  chemically synthesized
aaaggttaactccagaggtc

SEQ ID NO: 34095 - DNA, 20 bp, Artificial Sequence
  chemically synthesized
tcttttatttcttcatttta

SEQ ID NO: 34096 - DNA, 20 bp, Artificial Sequence
  chemically synthesized
catttacacaaaagtacaac

SEQ ID NO: 34097 - DNA, 20 bp, Artificial Sequence
  chemically synthesized
aaatgaaataccctatgtat

SEQ ID NO: 34098 - DNA, 20 bp, Artificial Sequence
  chemically synthesized
aaatccttgattcactggct

SEQ ID NO: 34099 - DNA, 20 bp, Artificial Sequence
  chemically synthesized
gtctgtatgtaacaagcttc

SEQ ID NO: 34100 - DNA, 20 bp, Artificial Sequence
  chemically synthesized
tgtgttttcctgccttttcc

SEQ ID NO: 34101 - DNA, 20 bp, Artificial Sequence
  chemically synthesized
atgacacttgtgattacatt

SEQ ID NO: 34102 - DNA, 20 bp, Artificial Sequence
  chemically synthesized
ttaggatacacccaaataat

SEQ ID NO: 34103 - DNA, 20 bp, Artificial Sequence
  chemically synthesized
agataatactcacaggtttc

SEQ ID NO: 34104 - DNA, 20 bp, Artificial Sequence
  chemically synthesized
gttaagccatacatatcttt

SEQ ID NO: 34105 - DNA, 20 bp, Artificial Sequence
  chemically synthesized
tcatctcatcaggtgttacc

SEQ ID NO: 34106 - DNA, 20 bp, Artificial Sequence
  chemically synthesized
catcaggtgttacctagaat

SEQ ID NO: 34107 - DNA, 20 bp, Artificial Sequence
  chemically synthesized
ccatatcctggggaccaggt

SEQ ID NO: 34108 - DNA, 20 bp, Artificial Sequence
  chemically synthesized
actgaagtcacatggagctc

SEQ ID NO: 34109 - DNA, 20 bp, Artificial Sequence
  chemically synthesized
aatgaaatcatatttttctg

SEQ ID NO: 34110 - DNA, 20 bp, Artificial Sequence
  chemically synthesized
aggcactgaaccagctggaa

SEQ ID NO: 34111 - DNA, 20 bp, Artificial Sequence
  chemically synthesized
aaccagctggaaatgaatgc

SEQ ID NO: 34112 - DNA, 20 bp, Artificial Sequence
  chemically synthesized
attttcgcagctgataaaag

SEQ ID NO: 34113 - DNA, 20 bp, Artificial Sequence
  chemically synthesized
aatgtctggagaaagcagct

SEQ ID NO: 34114 - DNA, 20 bp, Artificial Sequence
  chemically synthesized
actctgtactttttctctca

SEQ ID NO: 34115 - DNA, 20 bp, Artificial Sequence
  chemically synthesized
cctgcagctaagattgagaa

SEQ ID NO: 34116 - DNA, 20 bp, Artificial Sequence
  chemically synthesized
cctattttttaaagcacagt

SEQ ID NO: 34117 - DNA, 20 bp, Artificial Sequence
  chemically synthesized
ttctaaggccaccagttaca

SEQ ID NO: 34118 - DNA, 20 bp, Artificial Sequence
  chemically synthesized
acaaagaatggggaaggtta

SEQ ID NO: 34119 - DNA, 20 bp, Artificial Sequence
  chemically synthesized
tggtctaaaattccatttca

SEQ ID NO: 34120 - DNA, 20 bp, Artificial Sequence
  chemically synthesized
tcacagaattgaagataatt

SEQ ID NO: 34121 - DNA, 20 bp, Artificial Sequence
  chemically synthesized
aatcccgttgatggtgagca

SEQ ID NO: 34122 - DNA, 20 bp, Artificial Sequence
  chemically synthesized
gtgagcatggggttcatttt

SEQ ID NO: 34123 - DNA, 20 bp, Artificial Sequence
  chemically synthesized
ttcattttgagagtagaaaa

SEQ ID NO: 34124 - DNA, 20 bp, Artificial Sequence
  chemically synthesized
gtagaaaattggatgcagtg

SEQ ID NO: 34125 - DNA, 20 bp, Artificial Sequence
  chemically synthesized
aattggatgcagtggagaat

SEQ ID NO: 34126 - DNA, 20 bp, Artificial Sequence
  chemically synthesized
tgcagtggagaatcagaatg

SEQ ID NO: 34127 - DNA, 20 bp, Artificial Sequence
  chemically synthesized
attttcaaatatacaaaata

SEQ ID NO: 34128 - DNA, 20 bp, Artificial Sequence
  chemically synthesized
atattgagtctgaaggcaaa

SEQ ID NO: 34129 - DNA, 20 bp, Artificial Sequence
  chemically synthesized
cttgttacatctccacgcca

SEQ ID NO: 34130 - DNA, 20 bp, Artificial Sequence
  chemically synthesized
caactttagaaataaaggga

SEQ ID NO: 34131 - DNA, 20 bp, Artificial Sequence
  chemically synthesized
aaaaccagcaagtttgtatt

SEQ ID NO: 34132 - DNA, 20 bp, Artificial Sequence
  chemically synthesized
gaggcagtgtgcaaataggt

SEQ ID NO: 34133 - DNA, 20 bp, Artificial Sequence
  chemically synthesized
tcaagtactttacaaggtaa

SEQ ID NO: 34134 - DNA, 20 bp, Artificial Sequence
  chemically synthesized
tatcacaaggcaagtggagg

SEQ ID NO: 34135 - DNA, 20 bp, Artificial Sequence
  chemically synthesized
gataacatcttatcaggaga

SEQ ID NO: 34136 - DNA, 20 bp, Artificial Sequence
  chemically synthesized
ttatcaggagacagggtttt

SEQ ID NO: 34137 - DNA, 20 bp, Artificial Sequence
  chemically synthesized
ctgaccaaaatttattaggc

SEQ ID NO: 34138 - DNA, 20 bp, Artificial Sequence
  chemically synthesized
ctgggagcgctgtgggagac

SEQ ID NO: 34139 - DNA, 20 bp, Artificial Sequence
  chemically synthesized
tggctcgtattctctttctc

SEQ ID NO: 34140 - DNA, 20 bp, Artificial Sequence
  chemically synthesized
ggatgttccatgctgagaaa

SEQ ID NO: 34141 - DNA, 20 bp, Artificial Sequence
  chemically synthesized
ctgcctggctcaccagcagt

SEQ ID NO: 34142 - DNA, 20 bp, Artificial Sequence
  chemically synthesized
tgcagttaatgcaattatta

SEQ ID NO: 34143 - DNA, 20 bp, Artificial Sequence
  chemically synthesized
tatacatcctcctcagctga

SEQ ID NO: 34144 - DNA, 20 bp, Artificial Sequence
  chemically synthesized
taaagacaggcataaatcac

SEQ ID NO: 34145 - DNA, 20 bp, Artificial Sequence
  chemically synthesized
cttcagctgatccctccgtt

SEQ ID NO: 34146 - DNA, 20 bp, Artificial Sequence
  chemically synthesized
ggtatttaagttagagcaaa

SEQ ID NO: 34147 - DNA, 20 bp, Artificial Sequence
  chemically synthesized
cagcacacatacacttacat

SEQ ID NO: 34148 - DNA, 20 bp, Artificial Sequence
  chemically synthesized
cacaagaactcacaagtgtg

SEQ ID NO: 34149 - DNA, 20 bp, Artificial Sequence
  chemically synthesized
acaagtgtgttgagtgttgc

SEQ ID NO: 34150 - DNA, 20 bp, Artificial Sequence
  chemically synthesized
cctttaactttttttttcct

SEQ ID NO: 34151 - DNA, 20 bp, Artificial Sequence
  chemically synthesized
taaagtgaagagatggcaat

SEQ ID NO: 34152 - DNA, 20 bp, Artificial Sequence
  chemically synthesized
tacagcaaggctagtttgga

SEQ ID NO: 34153 - DNA, 20 bp, Artificial Sequence
  chemically synthesized
tttggagagggttttgctgt

SEQ ID NO: 34154 - DNA, 20 bp, Artificial Sequence
  chemically synthesized
atgctttttcttttttttcc

SEQ ID NO: 34155 - DNA, 20 bp, Artificial Sequence
  chemically synthesized
cccagagtttgaaagggaaa

SEQ ID NO: 34156 - DNA, 20 bp, Artificial Sequence
  chemically synthesized
caaatcagctaagtacagct

SEQ ID NO: 34157 - DNA, 20 bp, Artificial Sequence
  chemically synthesized
ttgtcacctacagtacattt

SEQ ID NO: 34158 - DNA, 20 bp, Artificial Sequence
  chemically synthesized
tacagtacatttctggattt

SEQ ID NO: 34159 - DNA, 20 bp, Artificial Sequence
  chemically synthesized
gtacatttctggatttggga

SEQ ID NO: 34160 - DNA, 20 bp, Artificial Sequence
  chemically synthesized
ttgggaatgagtgttcttca

SEQ ID NO: 34161 - DNA, 20 bp, Artificial Sequence
  chemically synthesized
aagaacactcattcccaaat

SEQ ID NO: 34162 - DNA, 20 bp, Artificial Sequence
  chemically synthesized
agcaggatttaaagagcatt

SEQ ID NO: 34163 - DNA, 20 bp, Artificial Sequence
  chemically synthesized
aaattggcagtttactaagg

SEQ ID NO: 34164 - DNA, 20 bp, Artificial Sequence
  chemically synthesized
ctttcaaactctgggaaaaa

SEQ ID NO: 34165 - DNA, 20 bp, Artificial Sequence
  chemically synthesized
tcttctttcaaaagcaaatg

SEQ ID NO: 34166 - DNA, 20 bp, Artificial Sequence
  chemically synthesized
ttctcagcatggaacatccc

SEQ ID NO: 34167 - DNA, 20 bp, Artificial Sequence
  chemically synthesized
gcatggaacatccctgagaa

SEQ ID NO: 34168 - DNA, 20 bp, Artificial Sequence
  chemically synthesized
ttggccgacgcttagggaaa

SEQ ID NO: 34169 - DNA, 20 bp, Artificial Sequence
  chemically synthesized
ccaacaacagtctgtatttg

SEQ ID NO: 34170 - DNA, 20 bp, Artificial Sequence
  chemically synthesized
cgggattgaatttgagctgc

SEQ ID NO: 34171 - DNA, 20 bp, Artificial Sequence
  chemically synthesized
actgtgctttaaaaaatagg

SEQ ID NO: 34172 - DNA, 20 bp, Artificial Sequence
  chemically synthesized
tttaaaaaataggaaagaaa

SEQ ID NO: 34173 - DNA, 20 bp, Artificial Sequence
  chemically synthesized
ttggtttttctaatcccctg

SEQ ID NO: 34174 - DNA, 20 bp, Artificial Sequence
  chemically synthesized
tccagacattgagctcaagg

SEQ ID NO: 34175 - DNA, 20 bp, Artificial Sequence
  chemically synthesized
tttctgaataatttgatccg

SEQ ID NO: 34176 - DNA, 20 bp, Artificial Sequence
  chemically synthesized
tatgatttcatttcttttcg

SEQ ID NO: 34177 - DNA, 20 bp, Artificial Sequence
  chemically synthesized
atatgcatactttctaaatg

SEQ ID NO: 34178 - DNA, 20 bp, Artificial Sequence
  chemically synthesized
gggagatttgacttataaga

SEQ ID NO: 34179 - DNA, 20 bp, Artificial Sequence
  chemically synthesized
ggtagcctctagaagaggaa

SEQ ID NO: 34180 - DNA, 20 bp, Artificial Sequence
  chemically synthesized
aatctctcatagagtctcca

SEQ ID NO: 34181 - DNA, 20 bp, Artificial Sequence
  chemically synthesized
agcaagaggaaatcagttac

SEQ ID NO: 34182 - DNA, 20 bp, Artificial Sequence
  chemically synthesized
gtcctgtctctggctaatca

SEQ ID NO: 34183 - DNA, 20 bp, Artificial Sequence
  chemically synthesized
tattaagcaagttcttcgtt

SEQ ID NO: 34184 - DNA, 20 bp, Artificial Sequence
  chemically synthesized
gttgacatattcattaaaat

SEQ ID NO: 34185 - DNA, 20 bp, Artificial Sequence
  chemically synthesized
taaaatgaagaaataaaaga

SEQ ID NO: 34186 - DNA, 20 bp, Artificial Sequence
  chemically synthesized
aattatataatgtttattga

SEQ ID NO: 34187 - DNA, 20 bp, Artificial Sequence
  chemically synthesized
aagattagacagcaggcagg

SEQ ID NO: 34188 - DNA, 20 bp, Artificial Sequence
  chemically synthesized
aacctctgctgaacttcctc

SEQ ID NO: 34189 - DNA, 20 bp, Artificial Sequence
  chemically synthesized
acttcctcatagaatgttca

SEQ ID NO: 34190 - DNA, 20 bp, Artificial Sequence
  chemically synthesized
cacaaaatatttgctgaatg

SEQ ID NO: 34191 - DNA, 20 bp, Artificial Sequence
  chemically synthesized
aggtgtttgattcttcaaac

SEQ ID NO: 34192 - DNA, 20 bp, Artificial Sequence
  chemically synthesized
gggttgggaaaaagacatag

SEQ ID NO: 34193 - DNA, 20 bp, Artificial Sequence
  chemically synthesized
actctgataccctgaagttc

SEQ ID NO: 34194 - DNA, 20 bp, Artificial Sequence
  chemically synthesized
tgcgtcactcaaactagctg

SEQ ID NO: 34195 - DNA, 20 bp, Artificial Sequence
  chemically synthesized
gtaggcttatttcaaaaggc

SEQ ID NO: 34196 - DNA, 20 bp, Artificial Sequence
  chemically synthesized
agcctgagtcaggactgagc

SEQ ID NO: 34197 - DNA, 20 bp, Artificial Sequence
  chemically synthesized
tatccaaagagtggtttgaa

SEQ ID NO: 34198 - DNA, 20 bp, Artificial Sequence
  chemically synthesized
agtcaccacacatagaggag

SEQ ID NO: 34199 - DNA, 20 bp, Artificial Sequence
  chemically synthesized
gaaaatggctgagttaaagg

SEQ ID NO: 34200 - DNA, 20 bp, Artificial Sequence
  chemically synthesized
caagggaaaggtgataaagg

SEQ ID NO: 34201 - DNA, 20 bp, Artificial Sequence
  chemically synthesized
gagagaggttcttgtttcaa

SEQ ID NO: 34202 - DNA, 20 bp, Artificial Sequence
  chemically synthesized
ggtatcttaaggcaaggaaa

SEQ ID NO: 34203 - DNA, 20 bp, Artificial Sequence
  chemically synthesized
ctctaactgatgctgagttt

SEQ ID NO: 34204 - DNA, 20 bp, Artificial Sequence
  chemically synthesized
ggggaggtgtttctgagttt

SEQ ID NO: 34205 - DNA, 20 bp, Artificial Sequence
  chemically synthesized
agtgcaaaggcacagcacat

SEQ ID NO: 34206 - DNA, 20 bp, Artificial Sequence
  chemically synthesized
atacagaatgcctgcatgct

SEQ ID NO: 34207 - DNA, 20 bp, Artificial Sequence
  chemically synthesized
tggtaggagttgaagtcttg

SEQ ID NO: 34208 - DNA, 20 bp, Artificial Sequence
  chemically synthesized
agtcttggaagaaagagtag

SEQ ID NO: 34209 - DNA, 20 bp, Artificial Sequence
  chemically synthesized
gcctgctgtctaatctttac

SEQ ID NO: 34210 - DNA, 20 bp, Artificial Sequence
  chemically synthesized
cagaggtcaggaatctgaac

SEQ ID NO: 34211 - DNA, 20 bp, Artificial Sequence
  chemically synthesized
acacaaaagtacaactgggg

SEQ ID NO: 34212 - DNA, 20 bp, Artificial Sequence
  chemically synthesized
atatgcaaaagtctgtttgg

SEQ ID NO: 34213 - DNA, 20 bp, Artificial Sequence
  chemically synthesized
tatgttcccatcaaggttaa

SEQ ID NO: 34214 - DNA, 20 bp, Artificial Sequence
  chemically synthesized
aaatattagactctttttcc

SEQ ID NO: 34215 - DNA, 20 bp, Artificial Sequence
  chemically synthesized
ttcatctcatcaggtgttac

SEQ ID NO: 34216 - DNA, 20 bp, Artificial Sequence
  chemically synthesized
gttacctagaatcagagtca

SEQ ID NO: 34217 - DNA, 20 bp, Artificial Sequence
  chemically synthesized
accatatcctggggaccagg

SEQ ID NO: 34218 - DNA, 20 bp, Artificial Sequence
  chemically synthesized
tcaggaatttattcttgcat

SEQ ID NO: 34219 - DNA, 20 bp, Artificial Sequence
  chemically synthesized
tatgcatataattctctcga

SEQ ID NO: 34220 - DNA, 20 bp, Artificial Sequence
  chemically synthesized
tttctgtcggatcaaattat

SEQ ID NO: 34221 - DNA, 20 bp, Artificial Sequence
  chemically synthesized
attattcagaaatccgaact

SEQ ID NO: 34222 - DNA, 20 bp, Artificial Sequence
  chemically synthesized
tgtccttgagctcaatgtct

SEQ ID NO: 34223 - DNA, 20 bp, Artificial Sequence
  chemically synthesized
gtactttttctctcagggga

SEQ ID NO: 34224 - DNA, 20 bp, Artificial Sequence
  chemically synthesized
caatgccctgcagctaagat

SEQ ID NO: 34225 - DNA, 20 bp, Artificial Sequence
  chemically synthesized
cttctaaggccaccagttac

SEQ ID NO: 34226 - DNA, 20 bp, Artificial Sequence
  chemically synthesized
agtaactccaccagtgcctg

SEQ ID NO: 34227 - DNA, 20 bp, Artificial Sequence
  chemically synthesized
ccttccttcctctcttgcag

SEQ ID NO: 34228 - DNA, 20 bp, Artificial Sequence
  chemically synthesized
ctggtctaaaattccatttc

SEQ ID NO: 34229 - DNA, 20 bp, Artificial Sequence
  chemically synthesized
gcatggggttcattttgaga

SEQ ID NO: 34230 - DNA, 20 bp, Artificial Sequence
  chemically synthesized
agtagaaaattggatgcagt

SEQ ID NO: 34231 - DNA, 20 bp, Artificial Sequence
  chemically synthesized
aaattggatgcagtggagaa

SEQ ID NO: 34232 - DNA, 20 bp, Artificial Sequence
  chemically synthesized
aatattgagtctgaaggcaa

SEQ ID NO: 34233 - DNA, 20 bp, Artificial Sequence
  chemically synthesized
tccctaagcgtcggccaact

SEQ ID NO: 34234 - DNA, 20 bp, Artificial Sequence
  chemically synthesized
aaagggacagagtacaaaag

SEQ ID NO: 34235 - DNA, 20 bp, Artificial Sequence
  chemically synthesized
atcaagtactttacaaggta

SEQ ID NO: 34236 - DNA, 20 bp, Artificial Sequence
  chemically synthesized
ttctcagggatgttccatgc

SEQ ID NO: 34237 - DNA, 20 bp, Artificial Sequence
  chemically synthesized
gggatgttccatgctgagaa

SEQ ID NO: 34238 - DNA, 20 bp, Artificial Sequence
  chemically synthesized
tcccatttgcttttgaaaga

SEQ ID NO: 34239 - DNA, 20 bp, Artificial Sequence
  chemically synthesized
gattgcagtaaagacaggca

SEQ ID NO: 34240 - DNA, 20 bp, Artificial Sequence
  chemically synthesized
gcagcacacatacacttaca

SEQ ID NO: 34241 - DNA, 20 bp, Artificial Sequence
  chemically synthesized
ctctccatgacttacctggt

SEQ ID NO: 34242 - DNA, 20 bp, Artificial Sequence
  chemically synthesized
attagaagtctttaaaattc

SEQ ID NO: 34243 - DNA, 20 bp, Artificial Sequence
  chemically synthesized
atacacaaacataggtccat

SEQ ID NO: 34244 - DNA, 20 bp, Artificial Sequence
  chemically synthesized
tgtgggtccaaccctgacag

SEQ ID NO: 34245 - DNA, 20 bp, Artificial Sequence
  chemically synthesized
tggtcagaccagttgatcct

SEQ ID NO: 34246 - DNA, 20 bp, Artificial Sequence
  chemically synthesized
cattggctaaagaggaaggt

SEQ ID NO: 34247 - DNA, 20 bp, Artificial Sequence
  chemically synthesized
agaatccatggaaaaggcag

SEQ ID NO: 34248 - DNA, 20 bp, Artificial Sequence
  chemically synthesized
tcctcatagaatgttcatca

SEQ ID NO: 34249 - DNA, 20 bp, Artificial Sequence
  chemically synthesized
tttagtcaggcataaagata

SEQ ID NO: 34250 - DNA, 20 bp, Artificial Sequence
  chemically synthesized
aacacttaggaacaaactgt

SEQ ID NO: 34251 - DNA, 20 bp, Artificial Sequence
  chemically synthesized
gactggtatcttaaggcaag

SEQ ID NO: 34252 - DNA, 20 bp, Artificial Sequence
  chemically synthesized
cagaatatgtccctaatatc

SEQ ID NO: 34253 - DNA, 20 bp, Artificial Sequence
  chemically synthesized
tcctaattggtaggaatcct

SEQ ID NO: 34254 - DNA, 20 bp, Artificial Sequence
  chemically synthesized
tgcctgcatgctctagaatc

SEQ ID NO: 34255 - DNA, 20 bp, Artificial Sequence
  chemically synthesized
aggtcaggaatctgaacaca

SEQ ID NO: 34256 - DNA, 20 bp, Artificial Sequence
  chemically synthesized
aataaacattatataatttt

SEQ ID NO: 34257 - DNA, 20 bp, Artificial Sequence
  chemically synthesized
aaccttggtttcctcatttc

SEQ ID NO: 34258 - DNA, 20 bp, Artificial Sequence
  chemically synthesized
ttaccacaaatttattggct

SEQ ID NO: 34259 - DNA, 20 bp, Artificial Sequence
  chemically synthesized
agtcaggagaaagcacctca

SEQ ID NO: 34260 - DNA, 20 bp, Artificial Sequence
  chemically synthesized
attcagaaatccgaactgta

SEQ ID NO: 34261 - DNA, 20 bp, Artificial Sequence
  chemically synthesized
tttttctctcaggggattag

SEQ ID NO: 34262 - DNA, 20 bp, Artificial Sequence
  chemically synthesized
cgtgatgccccacaagccac

SEQ ID NO: 34263 - DNA, 20 bp, Artificial Sequence
  chemically synthesized
agacacaaatgccaccatta

SEQ ID NO: 34264 - DNA, 20 bp, Artificial Sequence
  chemically synthesized
aaagagcatttcagaaaatt

SEQ ID NO: 34265 - DNA, 20 bp, Artificial Sequence
  chemically synthesized
gtaagaatttctatatggac

SEQ ID NO: 34266 - DNA, 20 bp, Artificial Sequence
  chemically synthesized
gaatcatttagggaagacaa

SEQ ID NO: 34267 - DNA, 20 bp, Artificial Sequence
  chemically synthesized
ctccacccttagctgtactt

SEQ ID NO: 34268 - DNA, 20 bp, Artificial Sequence
  chemically synthesized
tttgtgcgaatgcatgaaaa

SEQ ID NO: 34269 - DNA, 20 bp, Artificial Sequence
  chemically synthesized
caatgacacaatggaaccta

SEQ ID NO: 34270 - DNA, 20 bp, Artificial Sequence
  chemically synthesized
ccagaggaaaaaaaaagtta

SEQ ID NO: 34271 - DNA, 20 bp, Artificial Sequence
  chemically synthesized
ttgtgagttcttgtgcactg

SEQ ID NO: 34272 - DNA, 20 bp, Artificial Sequence
  chemically synthesized
gaaggtaatcagtggaaatt

SEQ ID NO: 34273 - DNA, 20 bp, Artificial Sequence
  chemically synthesized
gtaatcagtggaaatttgtc

SEQ ID NO: 34274 - DNA, 20 bp, Artificial Sequence
  chemically synthesized
tttgctctaacttaaatacc

SEQ ID NO: 34275 - DNA, 20 bp, Artificial Sequence
  chemically synthesized
ctgaagccatggcagaagtt

SEQ ID NO: 34276 - DNA, 20 bp, Artificial Sequence
  chemically synthesized
tggcagaagttcgtggattg

SEQ ID NO: 34277 - DNA, 20 bp, Artificial Sequence
  chemically synthesized
caatctctaaacataaattg

SEQ ID NO: 34278 - DNA, 20 bp, Artificial Sequence
  chemically synthesized
cacttccccagtcaatatcc

SEQ ID NO: 34279 - DNA, 20 bp, Artificial Sequence
  chemically synthesized
ctgcacaaattgtacagcat

SEQ ID NO: 34280 - DNA, 20 bp, Artificial Sequence
  chemically synthesized
gagaatacgagccaggaggt

SEQ ID NO: 34281 - DNA, 20 bp, Artificial Sequence
  chemically synthesized
cccagtctcccacagcgctc

SEQ ID NO: 34282 - DNA, 20 bp, Artificial Sequence
  chemically synthesized
aaaatccctaatacaaactt

SEQ ID NO: 34283 - DNA, 20 bp, Artificial Sequence
  chemically synthesized
aatacaaacttgctggtttt

SEQ ID NO: 34284 - DNA, 20 bp, Artificial Sequence
  chemically synthesized
tgtgatgcctcccccggatg

SEQ ID NO: 34285 - DNA, 20 bp, Artificial Sequence
  chemically synthesized
cctttatttctaaagttggc

SEQ ID NO: 34286 - DNA, 20 bp, Artificial Sequence
  chemically synthesized
acaaaaaatactaagttgta

SEQ ID NO: 34287 - DNA, 20 bp, Artificial Sequence
  chemically synthesized
atggcagagaccatccaaca

SEQ ID NO: 34288 - DNA, 20 bp, Artificial Sequence
  chemically synthesized
gaaccccatgctcaccatca

SEQ ID NO: 34289 - DNA, 20 bp, Artificial Sequence
  chemically synthesized
gccactgggcattacagtgc

SEQ ID NO: 34290 - DNA, 20 bp, Artificial Sequence
  chemically synthesized
ttcgctttgttcaactgccg

SEQ ID NO: 34291 - DNA, 20 bp, Artificial Sequence
  chemically synthesized
gaaggaaggctggagtacag

SEQ ID NO: 34292 - DNA, 20 bp, Artificial Sequence
  chemically synthesized
ttagaagagggttcagggtt

SEQ ID NO: 34293 - DNA, 20 bp, Artificial Sequence
  chemically synthesized
agtataaatggttctgaagc

SEQ ID NO: 34294 - DNA, 20 bp, Artificial Sequence
  chemically synthesized
tctgaagcacttgattcaga

SEQ ID NO: 34295 - DNA, 20 bp, Artificial Sequence
  chemically synthesized
agaaagtagaaagaacagct

SEQ ID NO: 34296 - DNA, 20 bp, Artificial Sequence
  chemically synthesized
ccaagaggtgtgagttctga

SEQ ID NO: 34297 - DNA, 20 bp, Artificial Sequence
  chemically synthesized
gctgagtcactatcaaatca

SEQ ID NO: 34298 - DNA, 20 bp, Artificial Sequence
  chemically synthesized
atcccctgagagaaaaagta

SEQ ID NO: 34299 - DNA, 20 bp, Artificial Sequence
  chemically synthesized
agaaaaagtacagagtttat

SEQ ID NO: 34300 - DNA, 20 bp, Artificial Sequence
  chemically synthesized
attaaggaagcagtattcac

SEQ ID NO: 34301 - DNA, 20 bp, Artificial Sequence
  chemically synthesized
gctcaaggacagaatctgaa

SEQ ID NO: 34302 - DNA, 20 bp, Artificial Sequence
  chemically synthesized
aaagtatactgtgtacaaaa

SEQ ID NO: 34303 - DNA, 20 bp, Artificial Sequence
  chemically synthesized
aaaaagctaacattaagcaa

SEQ ID NO: 34304 - DNA, 20 bp, Artificial Sequence
  chemically synthesized
aacattaagcaagtgtgttt

SEQ ID NO: 34305 - DNA, 20 bp, Artificial Sequence
  chemically synthesized
tgtttgtatgttttctacag

SEQ ID NO: 34306 - DNA, 20 bp, Artificial Sequence
  chemically synthesized
taatttgatccgacagaaaa

SEQ ID NO: 34307 - DNA, 20 bp, Artificial Sequence
  chemically synthesized
ttcagtaccatcagctcttt

SEQ ID NO: 34308 - DNA, 20 bp, Artificial Sequence
  chemically synthesized
tctttggcagcttatgagta

SEQ ID NO: 34309 - DNA, 20 bp, Artificial Sequence
  chemically synthesized
ttctcacctggtccccagga

SEQ ID NO: 34310 - DNA, 20 bp, Artificial Sequence
  chemically synthesized
ggatatggtttacttgtcag

SEQ ID NO: 34311 - DNA, 20 bp, Artificial Sequence
  chemically synthesized
cttgtcagagtagttttatg

SEQ ID NO: 34312 - DNA, 20 bp, Artificial Sequence
  chemically synthesized
tatgaggtgctttctcctga

SEQ ID NO: 34313 - DNA, 20 bp, Artificial Sequence
  chemically synthesized
accttgatgggaacatagaa

SEQ ID NO: 34314 - DNA, 20 bp, Artificial Sequence
  chemically synthesized
ggctcactctgaaagatatg

SEQ ID NO: 34315 - DNA, 20 bp, Artificial Sequence
  chemically synthesized
cattataagagggaggcaaa

SEQ ID NO: 34316 - DNA, 20 bp, Artificial Sequence
  chemically synthesized
ttataagaggagaaaatgtg

SEQ ID NO: 34317 - DNA, 20 bp, Artificial Sequence
  chemically synthesized
cctcgactttagcccagtga

SEQ ID NO: 34318 - DNA, 20 bp, Artificial Sequence
  chemically synthesized
acttcaagataatacatttg

SEQ ID NO: 34319 - DNA, 20 bp, Artificial Sequence
  chemically synthesized
ctaatcattagaatcactcc

SEQ ID NO: 34320 - DNA, 20 bp, Artificial Sequence
  chemically synthesized
cagacccagagccagtgaat

SEQ ID NO: 34321 - DNA, 20 bp, Artificial Sequence
  chemically synthesized
gcctgaatattaagcaagtt

SEQ ID NO: 34322 - DNA, 20 bp, Artificial Sequence
  chemically synthesized
ccagttgtacttttgtgtaa

SEQ ID NO: 34323 - DNA, 20 bp, Artificial Sequence
  chemically synthesized
tgtgtaaatgtgatttcatt

SEQ ID NO: 34324 - DNA, 20 bp, Artificial Sequence
  chemically synthesized
tgaagaaataaaagatgaga

SEQ ID NO: 34325 - DNA, 20 bp, Artificial Sequence
  chemically synthesized
aaacagttttaaaaattata

SEQ ID NO: 34326 - DNA, 20 bp, Artificial Sequence
  chemically synthesized
tttaaaaattatataatgtt

SEQ ID NO: 34327 - DNA, 20 bp, Artificial Sequence
  chemically synthesized
ttagaatgaatatgatgcaa

SEQ ID NO: 34328 - DNA, 20 bp, Artificial Sequence
  chemically synthesized
atgcaatctggttttctgtg

SEQ ID NO: 34329 - DNA, 20 bp, Artificial Sequence
  chemically synthesized
ctggagttaacctttctttg

SEQ ID NO: 34330 - DNA, 20 bp, Artificial Sequence
  chemically synthesized
tcctggtgctgtgcataata

SEQ ID NO: 34331 - DNA, 20 bp, Artificial Sequence
  chemically synthesized
tgcttaaacatgacagcagg

SEQ ID NO: 34332 - DNA, 20 bp, Artificial Sequence
  chemically synthesized
aatttatttataaatggtaa

SEQ ID NO: 34333 - DNA, 20 bp, Artificial Sequence
  chemically synthesized
atagaatgttcatcagaaaa

SEQ ID NO: 34334 - DNA, 20 bp, Artificial Sequence
  chemically synthesized
tccaaccaccgcctgggtat

SEQ ID NO: 34335 - DNA, 20 bp, Artificial Sequence
  chemically synthesized
atcaactcaaatttggctga

SEQ ID NO: 34336 - DNA, 20 bp, Artificial Sequence
  chemically synthesized
tcaaatttggctgacacagt

SEQ ID NO: 34337 - DNA, 20 bp, Artificial Sequence
  chemically synthesized
ttccaacttctctctgaaga

SEQ ID NO: 34338 - DNA, 20 bp, Artificial Sequence
  chemically synthesized
aagtcttttactccggtgtg

SEQ ID NO: 34339 - DNA, 20 bp, Artificial Sequence
  chemically synthesized
tactccggtgtggagtgttt

SEQ ID NO: 34340 - DNA, 20 bp, Artificial Sequence
  chemically synthesized
aggattcctaccaattagga

SEQ ID NO: 34341 - DNA, 20 bp, Artificial Sequence
  chemically synthesized
ttcctaccaattaggaaggt

SEQ ID NO: 34342 - DNA, 20 bp, Artificial Sequence
  chemically synthesized
agaaacacctccccttaact

SEQ ID NO: 34343 - DNA, 20 bp, Artificial Sequence
  chemically synthesized
ttacacatgcatgcgttgag

SEQ ID NO: 34344 - DNA, 20 bp, Artificial Sequence
  chemically synthesized
agcctggcctgggcactagg

SEQ ID NO: 34345 - DNA, 20 bp, Artificial Sequence
  chemically synthesized
ttttagatattagggacata

SEQ ID NO: 34346 - DNA, 20 bp, Artificial Sequence
  chemically synthesized
ggacttcgcattcaaacata

SEQ ID NO: 34347 - DNA, 20 bp, Artificial Sequence
  chemically synthesized
acaagaacctctctctatac

SEQ ID NO: 34348 - DNA, 20 bp, Artificial Sequence
  chemically synthesized
tctataccccagatttattt

SEQ ID NO: 34349 - DNA, 20 bp, Artificial Sequence
  chemically synthesized
tatgagttaattcatagcta

SEQ ID NO: 34350 - DNA, 20 bp, Artificial Sequence
  chemically synthesized
tgcgtattactaaaaagaag

SEQ ID NO: 34351 - DNA, 20 bp, Artificial Sequence
  chemically synthesized
aaggaatgatttcctagagg

SEQ ID NO: 34352 - DNA, 20 bp, Artificial Sequence
  chemically synthesized
aggtgcttcttctggccaag

SEQ ID NO: 34353 - DNA, 20 bp, Artificial Sequence
  chemically synthesized
aggggagctcttaggatgtc

SEQ ID NO: 34354 - DNA, 20 bp, Artificial Sequence
  chemically synthesized
aaaggcaagggatgaccaat

SEQ ID NO: 34355 - DNA, 20 bp, Artificial Sequence
  chemically synthesized
acagggaagcctctgaacac

SEQ ID NO: 34356 - DNA, 20 bp, Artificial Sequence
  chemically synthesized
aagccatagcaaacttgtca

SEQ ID NO: 34357 - DNA, 20 bp, Artificial Sequence
  chemically synthesized
gcccagaggatataaagcca

SEQ ID NO: 34358 - DNA, 20 bp, Artificial Sequence
  chemically synthesized
tctttggatattccggttcc

SEQ ID NO: 34359 - DNA, 20 bp, Artificial Sequence
  chemically synthesized
ttccggttcccactgcttca

SEQ ID NO: 34360 - DNA, 20 bp, Artificial Sequence
  chemically synthesized
atacacagggacaaagtcca

SEQ ID NO: 34361 - DNA, 20 bp, Artificial Sequence
  chemically synthesized
taaccggttacacaattgcc

SEQ ID NO: 34362 - DNA, 20 bp, Artificial Sequence
  chemically synthesized
acacaattgcctttggtttt

SEQ ID NO: 34363 - DNA, 20 bp, Artificial Sequence
  chemically synthesized
ggtttttacagtttgttcct

SEQ ID NO: 34364 - DNA, 20 bp, Artificial Sequence
  chemically synthesized
gtttgttcctaagtgtttcc

SEQ ID NO: 34365 - DNA, 20 bp, Artificial Sequence
  chemically synthesized
tggttcctcttcacctgagg

SEQ ID NO: 34366 - DNA, 20 bp, Artificial Sequence
  chemically synthesized
attatttattccagttaaaa

SEQ ID NO: 34367 - DNA, 20 bp, Artificial Sequence
  chemically synthesized
tagtgcctgctgtgtgtggt

SEQ ID NO: 34368 - DNA, 20 bp, Artificial Sequence
  chemically synthesized
ctgccacagttcctttcccc

SEQ ID NO: 34369 - DNA, 20 bp, Artificial Sequence
  chemically synthesized
gcaattgtgtaaccggttaa

SEQ ID NO: 34370 - DNA, 20 bp, Artificial Sequence
  chemically synthesized
tgagttagacaattctttca

SEQ ID NO: 34371 - DNA, 20 bp, Artificial Sequence
  chemically synthesized
gggaaccggaatatccaaag

SEQ ID NO: 34372 - DNA, 20 bp, Artificial Sequence
  chemically synthesized
tttgaaggagaaagaagcat

SEQ ID NO: 34373 - DNA, 20 bp, Artificial Sequence
  chemically synthesized
tggctttatatcctctgggc

SEQ ID NO: 34374 - DNA, 20 bp, Artificial Sequence
  chemically synthesized
taaaggtaagaaaccatctg

SEQ ID NO: 34375 - DNA, 20 bp, Artificial Sequence
  chemically synthesized
aaaccatctgacaagtttgc

SEQ ID NO: 34376 - DNA, 20 bp, Artificial Sequence
  chemically synthesized
cttcttcagccaaaatttat

SEQ ID NO: 34377 - DNA, 20 bp, Artificial Sequence
  chemically synthesized
tggttcaaacccctgtgttc

SEQ ID NO: 34378 - DNA, 20 bp, Artificial Sequence
  chemically synthesized
ctcccctccactacggacat

SEQ ID NO: 34379 - DNA, 20 bp, Artificial Sequence
  chemically synthesized
cacttccggtgaccagttag

SEQ ID NO: 34380 - DNA, 20 bp, Artificial Sequence
  chemically synthesized
tctggggtatagagagaggt

SEQ ID NO: 34381 - DNA, 20 bp, Artificial Sequence
  chemically synthesized
tcttgtttcaattagaaaag

SEQ ID NO: 34382 - DNA, 20 bp, Artificial Sequence
  chemically synthesized
aaaagtaatgcttggagaga

SEQ ID NO: 34383 - DNA, 20 bp, Artificial Sequence
  chemically synthesized
aaggtcactgccaatagatg

SEQ ID NO: 34384 - DNA, 20 bp, Artificial Sequence
  chemically synthesized
atgacttgattagaagcagg

SEQ ID NO: 34385 - DNA, 20 bp, Artificial Sequence
  chemically synthesized
aaccatgcctagtgcccagg

SEQ ID NO: 34386 - DNA, 20 bp, Artificial Sequence
  chemically synthesized
acagacatcttccctgaatg

SEQ ID NO: 34387 - DNA, 20 bp, Artificial Sequence
  chemically synthesized
ctaatgccctctaactgatg

SEQ ID NO: 34388 - DNA, 20 bp, Artificial Sequence
  chemically synthesized
agaatccatcagttaagggg

SEQ ID NO: 34389 - DNA, 20 bp, Artificial Sequence
  chemically synthesized
tcagttaaggggaggtgttt

SEQ ID NO: 34390 - DNA, 20 bp, Artificial Sequence
  chemically synthesized
tccacaccggagtaaaagac

SEQ ID NO: 34391 - DNA, 20 bp, Artificial Sequence
  chemically synthesized
tttgtgctagtgcatgacac

SEQ ID NO: 34392 - DNA, 20 bp, Artificial Sequence
  chemically synthesized
actgagatacccaggcggtg

SEQ ID NO: 34393 - DNA, 20 bp, Artificial Sequence
  chemically synthesized
gcggtggttggatttatgga

SEQ ID NO: 34394 - DNA, 20 bp, Artificial Sequence
  chemically synthesized
gaagaaagagtagatagaaa

SEQ ID NO: 34395 - DNA, 20 bp, Artificial Sequence
  chemically synthesized
tgtaaaatcctatcctgctg

SEQ ID NO: 34396 - DNA, 20 bp, Artificial Sequence
  chemically synthesized
attgcatgccagtctttgct

SEQ ID NO: 34397 - DNA, 20 bp, Artificial Sequence
  chemically synthesized
caggaatctgaacacagaaa

SEQ ID NO: 34398 - DNA, 20 bp, Artificial Sequence
  chemically synthesized
aaacattatataatttttaa

SEQ ID NO: 34399 - DNA, 20 bp, Artificial Sequence
  chemically synthesized
ataccctatgtatttgagta

SEQ ID NO: 34400 - DNA, 20 bp, Artificial Sequence
  chemically synthesized
ctatgtatttgagtaagttg

SEQ ID NO: 34401 - DNA, 20 bp, Artificial Sequence
  chemically synthesized
gttgcttagcttctcccaac

SEQ ID NO: 34402 - DNA, 20 bp, Artificial Sequence
  chemically synthesized
cctcatttctaaaacgaaga

SEQ ID NO: 34403 - DNA, 20 bp, Artificial Sequence
  chemically synthesized
tctgggccccaccaccaaat

SEQ ID NO: 34404 - DNA, 20 bp, Artificial Sequence
  chemically synthesized
tggctctgggtctgtatgta

SEQ ID NO: 34405 - DNA, 20 bp, Artificial Sequence
  chemically synthesized
ctgtatgtaacaagcttctg

SEQ ID NO: 34406 - DNA, 20 bp, Artificial Sequence
  chemically synthesized
acaagcttctggagtgattc

SEQ ID NO: 34407 - DNA, 20 bp, Artificial Sequence
  chemically synthesized
caggacctactattctacgt

SEQ ID NO: 34408 - DNA, 20 bp, Artificial Sequence
  chemically synthesized
taaaaaattaccacaaattt

SEQ ID NO: 34409 - DNA, 20 bp, Artificial Sequence
  chemically synthesized
gtggaggtcagaagtctgaa

SEQ ID NO: 34410 - DNA, 20 bp, Artificial Sequence
  chemically synthesized
taaagtcgaggtgtcagtgt

SEQ ID NO: 34411 - DNA, 20 bp, Artificial Sequence
  chemically synthesized
gtttcttctggagactctat

SEQ ID NO: 34412 - DNA, 20 bp, Artificial Sequence
  chemically synthesized
tctggagactctatgagaga

SEQ ID NO: 34413 - DNA, 20 bp, Artificial Sequence
  chemically synthesized
ttgtgttttcctgccttttc

SEQ ID NO: 34414 - DNA, 20 bp, Artificial Sequence
  chemically synthesized
tttcctgccttttccatgga

SEQ ID NO: 34415 - DNA, 20 bp, Artificial Sequence
  chemically synthesized
tctagaggctacccacattc

SEQ ID NO: 34416 - DNA, 20 bp, Artificial Sequence
  chemically synthesized
cgatcttcaaaaaaatgtat

SEQ ID NO: 34417 - DNA, 20 bp, Artificial Sequence
  chemically synthesized
cctccctcttataatgacac

SEQ ID NO: 34418 - DNA, 20 bp, Artificial Sequence
  chemically synthesized
ccttaattatatatgcaaaa

SEQ ID NO: 34419 - DNA, 20 bp, Artificial Sequence
  chemically synthesized
ggctagaaaagataatactc

SEQ ID NO: 34420 - DNA, 20 bp, Artificial Sequence
  chemically synthesized
acagaaaaaaaaaatgtagc

SEQ ID NO: 34421 - DNA, 20 bp, Artificial Sequence
  chemically synthesized
tgtagaaaacatacaaacac

SEQ ID NO: 34422 - DNA, 20 bp, Artificial Sequence
  chemically synthesized
tacaaacacacttgcttaat

SEQ ID NO: 34423 - DNA, 20 bp, Artificial Sequence
  chemically synthesized
gcactgaaccagctggaaat

SEQ ID NO: 34424 - DNA, 20 bp, Artificial Sequence
  chemically synthesized
gaaccagctggaaatgaatg

SEQ ID NO: 34425 - DNA, 20 bp, Artificial Sequence
  chemically synthesized
cgcagctgataaaagcagag

SEQ ID NO: 34426 - DNA, 20 bp, Artificial Sequence
  chemically synthesized
ctggagaaagcagctgtgaa

SEQ ID NO: 34427 - DNA, 20 bp, Artificial Sequence
  chemically synthesized
aactctgtactttttctctc

SEQ ID NO: 34428 - DNA, 20 bp, Artificial Sequence
  chemically synthesized
ctcaggggattagaaaaacc

SEQ ID NO: 34429 - DNA, 20 bp, Artificial Sequence
  chemically synthesized
aattgatttgatagtgactc

SEQ ID NO: 34430 - DNA, 20 bp, Artificial Sequence
  chemically synthesized
ctttagccaatgccctgcag

SEQ ID NO: 34431 - DNA, 20 bp, Artificial Sequence
  chemically synthesized
ccctgcagctaagattgaga

SEQ ID NO: 34432 - DNA, 20 bp, Artificial Sequence
  chemically synthesized
gattcagaactcacacctct

SEQ ID NO: 34433 - DNA, 20 bp, Artificial Sequence
  chemically synthesized
tttaaagcacagtctgaatc

SEQ ID NO: 34434 - DNA, 20 bp, Artificial Sequence
  chemically synthesized
gcgaaggcactgtaatgccc

SEQ ID NO: 34435 - DNA, 20 bp, Artificial Sequence
  chemically synthesized
atatcatcctaactgcatgc

SEQ ID NO: 34436 - DNA, 20 bp, Artificial Sequence
  chemically synthesized
aaagaataatttttcacttc

SEQ ID NO: 34437 - DNA, 20 bp, Artificial Sequence
  chemically synthesized
cctgatcatcactcacacat

SEQ ID NO: 34438 - DNA, 20 bp, Artificial Sequence
  chemically synthesized
cccacaagccacaaaaacca

SEQ ID NO: 34439 - DNA, 20 bp, Artificial Sequence
  chemically synthesized
aaaaaccagcaagtttgtat

SEQ ID NO: 34440 - DNA, 20 bp, Artificial Sequence
  chemically synthesized
ggcgaaattaaaattgctaa

SEQ ID NO: 34441 - DNA, 20 bp, Artificial Sequence
  chemically synthesized
gataacatcttatcaggaga

SEQ ID NO: 34442 - DNA, 20 bp, Artificial Sequence
  chemically synthesized
gacaggcgcacctggagggg

SEQ ID NO: 34443 - DNA, 20 bp, Artificial Sequence
  chemically synthesized
aattcagcgatatttctccc

SEQ ID NO: 34444 - DNA, 20 bp, Artificial Sequence
  chemically synthesized
ctgcctggctcaccagcagt

SEQ ID NO: 34445 - DNA, 20 bp, Artificial Sequence
  chemically synthesized
atatacatcctcctcagctg

SEQ ID NO: 34446 - DNA, 20 bp, Artificial Sequence
  chemically synthesized
cctcctcagctgacaggatt

SEQ ID NO: 34447 - DNA, 20 bp, Artificial Sequence
  chemically synthesized
gtccatgaaatctttacaat

SEQ ID NO: 34448 - DNA, 20 bp, Artificial Sequence
  chemically synthesized
aaatctttacaatttatgtt

SEQ ID NO: 34449 - DNA, 20 bp, Artificial Sequence
  chemically synthesized
cacaatccacgaacttctgc

SEQ ID NO: 34450 - DNA, 20 bp, Artificial Sequence
  chemically synthesized
gccatggcttcagctgatcc

SEQ ID NO: 34451 - DNA, 20 bp, Artificial Sequence
  chemically synthesized
gctgtgttcagatggttaca

SEQ ID NO: 34452 - DNA, 20 bp, Artificial Sequence
  chemically synthesized
acacatacacttacattaga

SEQ ID NO: 34453 - DNA, 20 bp, Artificial Sequence
  chemically synthesized
tcaatcaatcgacaaatttc

SEQ ID NO: 34454 - DNA, 20 bp, Artificial Sequence
  chemically synthesized
tgccatagtctcagccttca

SEQ ID NO: 34455 - DNA, 20 bp, Artificial Sequence
  chemically synthesized
gtgtgttgagtgttgcaaga

SEQ ID NO: 34456 - DNA, 20 bp, Artificial Sequence
  chemically synthesized
ccatagatgaggcagatagc

SEQ ID NO: 34457 - DNA, 20 bp, Artificial Sequence
  chemically synthesized
aggcttctgcctacagcaag

SEQ ID NO: 34458 - DNA, 20 bp, Artificial Sequence
  chemically synthesized
tacagcaaggctagtttgga

SEQ ID NO: 34459 - DNA, 20 bp, Artificial Sequence
  chemically synthesized
ggacccacacacctcttcat

SEQ ID NO: 34460 - DNA, 20 bp, Artificial Sequence
  chemically synthesized
atgctttttcttttttttcc

SEQ ID NO: 34461 - DNA, 20 bp, Artificial Sequence
  chemically synthesized
ctatgcaatatccagcactc

SEQ ID NO: 34462 - DNA, 20 bp, Artificial Sequence
  chemically synthesized
gaaaccatattgtcttccct

SEQ ID NO: 34463 - DNA, 20 bp, Artificial Sequence
  chemically synthesized
tttgtcacctacagtacatt

SEQ ID NO: 34464 - DNA, 22 bp, Artificial Sequence
  chemically synthesized
tccttctggcagggaacctggg

SEQ ID NO: 34465 - DNA, 22 bp, Artificial Sequence
  chemically synthesized
ctggcagggaacctgggcagcg

SEQ ID NO: 34466 - DNA, 22 bp, Artificial Sequence
  chemically synthesized
tggcagggaacctgggcagcga

SEQ ID NO: 34467 - DNA, 22 bp, Artificial Sequence
  chemically synthesized
gcagggaacctgggcagcgagg

SEQ ID NO: 34468 - DNA, 22 bp, Artificial Sequence
  chemically synthesized
ggcagcgaggatcctctgaaga

SEQ ID NO: 34469 - DNA, 22 bp, Artificial Sequence
  chemically synthesized
tgaagaacactcattcccaaat

SEQ ID NO: 34470 - DNA, 22 bp, Artificial Sequence
  chemically synthesized
aagaacactcattcccaaatcc

SEQ ID NO: 34471 - DNA, 22 bp, Artificial Sequence
  chemically synthesized
attcccaaatccagaaatgtac

SEQ ID NO: 34472 - DNA, 22 bp, Artificial Sequence
  chemically synthesized
ccaaatccagaaatgtactgta

SEQ ID NO: 34473 - DNA, 22 bp, Artificial Sequence
  chemically synthesized
taggtgacaaagacacaaatgc

SEQ ID NO: 34474 - DNA, 22 bp, Artificial Sequence
  chemically synthesized
gcaggatttaaagagcatttca

SEQ ID NO: 34475 - DNA, 22 bp, Artificial Sequence
  chemically synthesized
aaagagcatttcagaaaattgg

SEQ ID NO: 34476 - DNA, 22 bp, Artificial Sequence
  chemically synthesized
aagagcatttcagaaaattggc

SEQ ID NO: 34477 - DNA, 22 bp, Artificial Sequence
  chemically synthesized
cagaaaattggcagtttactaa

SEQ ID NO: 34478 - DNA, 22 bp, Artificial Sequence
  chemically synthesized
agaaaattggcagtttactaag

SEQ ID NO: 34479 - DNA, 22 bp, Artificial Sequence
  chemically synthesized
gcagtttactaaggtaagaatt

SEQ ID NO: 34480 - DNA, 22 bp, Artificial Sequence
  chemically synthesized
actaaggtaagaatttctatat

SEQ ID NO: 34481 - DNA, 22 bp, Artificial Sequence
  chemically synthesized
ctaaggtaagaatttctatatg

SEQ ID NO: 34482 - DNA, 22 bp, Artificial Sequence
  chemically synthesized
aggtaagaatttctatatggac

SEQ ID NO: 34483 - DNA, 22 bp, Artificial Sequence
  chemically synthesized
ctatatggacctatgtttgtgt

SEQ ID NO: 34484 - DNA, 22 bp, Artificial Sequence
  chemically synthesized
tatatggacctatgtttgtgta

SEQ ID NO: 34485 - DNA, 22 bp, Artificial Sequence
  chemically synthesized
tatggacctatgtttgtgtatg

SEQ ID NO: 34486 - DNA, 22 bp, Artificial Sequence
  chemically synthesized
tgtttgtgtatgatgttccaca

SEQ ID NO: 34487 - DNA, 22 bp, Artificial Sequence
  chemically synthesized
gtgtatgatgttccacatataa

SEQ ID NO: 34488 - DNA, 22 bp, Artificial Sequence
  chemically synthesized
tgtatgatgttccacatataat

SEQ ID NO: 34489 - DNA, 22 bp, Artificial Sequence
  chemically synthesized
cacatataatatctttactgtg

SEQ ID NO: 34490 - DNA, 22 bp, Artificial Sequence
  chemically synthesized
tactgtgtcttgacatatgaat

SEQ ID NO: 34491 - DNA, 22 bp, Artificial Sequence
  chemically synthesized
actgtgtcttgacatatgaatc

SEQ ID NO: 34492 - DNA, 22 bp, Artificial Sequence
  chemically synthesized
ctgtgtcttgacatatgaatca

SEQ ID NO: 34493 - DNA, 22 bp, Artificial Sequence
  chemically synthesized
tgtcttgacatatgaatcattt

SEQ ID NO: 34494 - DNA, 22 bp, Artificial Sequence
  chemically synthesized
gacatatgaatcatttagggaa

SEQ ID NO: 34495 - DNA, 22 bp, Artificial Sequence
  chemically synthesized
acatatgaatcatttagggaag

SEQ ID NO: 34496 - DNA, 22 bp, Artificial Sequence
  chemically synthesized
agggaagacaatatggtttctg

SEQ ID NO: 34497 - DNA, 22 bp, Artificial Sequence
  chemically synthesized
gggaagacaatatggtttctgt

SEQ ID NO: 34498 - DNA, 22 bp, Artificial Sequence
  chemically synthesized
ctgtgaattttaaagacttcta

SEQ ID NO: 34499 - DNA, 22 bp, Artificial Sequence
  chemically synthesized
tgtgaattttaaagacttctaa

SEQ ID NO: 34500 - DNA, 22 bp, Artificial Sequence
  chemically synthesized
tgaattttaaagacttctaatt

SEQ ID NO: 34501 - DNA, 22 bp, Artificial Sequence
  chemically synthesized
taaagacttctaattaatcaga

SEQ ID NO: 34502 - DNA, 22 bp, Artificial Sequence
  chemically synthesized
aaagacttctaattaatcagaa

SEQ ID NO: 34503 - DNA, 22 bp, Artificial Sequence
  chemically synthesized
aagacttctaattaatcagaag

SEQ ID NO: 34504 - DNA, 22 bp, Artificial Sequence
  chemically synthesized
ctaattaatcagaagagtgctg

SEQ ID NO: 34505 - DNA, 22 bp, Artificial Sequence
  chemically synthesized
taattaatcagaagagtgctgg

SEQ ID NO: 34506 - DNA, 22 bp, Artificial Sequence
  chemically synthesized
attaatcagaagagtgctggat

SEQ ID NO: 34507 - DNA, 22 bp, Artificial Sequence
  chemically synthesized
atcagaagagtgctggatattg

SEQ ID NO: 34508 - DNA, 22 bp, Artificial Sequence
  chemically synthesized
gatattgcatagacttctccac

SEQ ID NO: 34509 - DNA, 22 bp, Artificial Sequence
  chemically synthesized
catagacttctccacccttagc

SEQ ID NO: 34510 - DNA, 22 bp, Artificial Sequence
  chemically synthesized
ctccacccttagctgtacttag

SEQ ID NO: 34511 - DNA, 22 bp, Artificial Sequence
  chemically synthesized
tccacccttagctgtacttagc

SEQ ID NO: 34512 - DNA, 22 bp, Artificial Sequence
  chemically synthesized
cacccttagctgtacttagctg

SEQ ID NO: 34513 - DNA, 22 bp, Artificial Sequence
  chemically synthesized
agctgtacttagctgatttgtg

SEQ ID NO: 34514 - DNA, 22 bp, Artificial Sequence
  chemically synthesized
gctgtacttagctgatttgtgg

SEQ ID NO: 34515 - DNA, 22 bp, Artificial Sequence
  chemically synthesized
tacttagctgatttgtgggtct

SEQ ID NO: 34516 - DNA, 22 bp, Artificial Sequence
  chemically synthesized
agctgatttgtgggtctacact

SEQ ID NO: 34517 - DNA, 22 bp, Artificial Sequence
  chemically synthesized
gctgatttgtgggtctacactg

SEQ ID NO: 34518 - DNA, 22 bp, Artificial Sequence
  chemically synthesized
atttgtgggtctacactgtaac

SEQ ID NO: 34519 - DNA, 22 bp, Artificial Sequence
  chemically synthesized
gtgggtctacactgtaacctcc

SEQ ID NO: 34520 - DNA, 22 bp, Artificial Sequence
  chemically synthesized
tgggtctacactgtaacctccc

SEQ ID NO: 34521 - DNA, 22 bp, Artificial Sequence
  chemically synthesized
cactgtaacctccctgaacttg

SEQ ID NO: 34522 - DNA, 22 bp, Artificial Sequence
  chemically synthesized
taacctccctgaacttgagact

SEQ ID NO: 34523 - DNA, 22 bp, Artificial Sequence
  chemically synthesized
cctgaacttgagactccatttc

SEQ ID NO: 34524 - DNA, 22 bp, Artificial Sequence
  chemically synthesized
aacttgagactccatttccctt

SEQ ID NO: 34525 - DNA, 22 bp, Artificial Sequence
  chemically synthesized
gagactccatttccctttcaaa

SEQ ID NO: 34526 - DNA, 22 bp, Artificial Sequence
  chemically synthesized
agactccatttccctttcaaac

SEQ ID NO: 34527 - DNA, 22 bp, Artificial Sequence
  chemically synthesized
catttccctttcaaactctggg

SEQ ID NO: 34528 - DNA, 22 bp, Artificial Sequence
  chemically synthesized
ccctttcaaactctgggaaaaa

SEQ ID NO: 34529 - DNA, 22 bp, Artificial Sequence
  chemically synthesized
cctttcaaactctgggaaaaaa

SEQ ID NO: 34530 - DNA, 22 bp, Artificial Sequence
  chemically synthesized
tcaaactctgggaaaaaaaaga

SEQ ID NO: 34531 - DNA, 22 bp, Artificial Sequence
  chemically synthesized
caaactctgggaaaaaaaagaa

SEQ ID NO: 34532 - DNA, 22 bp, Artificial Sequence
  chemically synthesized
aaactctgggaaaaaaaagaaa

SEQ ID NO: 34533 - DNA, 22 bp, Artificial Sequence
  chemically synthesized
tgggaaaaaaaagaaaaagcat

SEQ ID NO: 34534 - DNA, 22 bp, Artificial Sequence
  chemically synthesized
ggaaaaaaaagaaaaagcatct

SEQ ID NO: 34535 - DNA, 22 bp, Artificial Sequence
  chemically synthesized
tgaagaggtgtgtgggtccaac

SEQ ID NO: 34536 - DNA, 22 bp, Artificial Sequence
  chemically synthesized
acagcaaaaccctctccaaact

SEQ ID NO: 34537 - DNA, 22 bp, Artificial Sequence
  chemically synthesized
tccaaactagccttgctgtagg

SEQ ID NO: 34538 - DNA, 22 bp, Artificial Sequence
  chemically synthesized
caaactagccttgctgtaggca

SEQ ID NO: 34539 - DNA, 22 bp, Artificial Sequence
  chemically synthesized
gccttgctgtaggcagaagcct

SEQ ID NO: 34540 - DNA, 22 bp, Artificial Sequence
  chemically synthesized
gctgtaggcagaagcctctgct

SEQ ID NO: 34541 - DNA, 22 bp, Artificial Sequence
  chemically synthesized
ctgtaggcagaagcctctgcta

SEQ ID NO: 34542 - DNA, 22 bp, Artificial Sequence
  chemically synthesized
taggcagaagcctctgctatct

SEQ ID NO: 34543 - DNA, 22 bp, Artificial Sequence
  chemically synthesized
tgctatctgcctcatctatgga

SEQ ID NO: 34544 - DNA, 22 bp, Artificial Sequence
  chemically synthesized
ctatctgcctcatctatggaac

SEQ ID NO: 34545 - DNA, 22 bp, Artificial Sequence
  chemically synthesized
tctgcctcatctatggaacaca

SEQ ID NO: 34546 - DNA, 22 bp, Artificial Sequence
  chemically synthesized
cctcatctatggaacacatcta

SEQ ID NO: 34547 - DNA, 22 bp, Artificial Sequence
  chemically synthesized
atctatggaacacatctatatt

SEQ ID NO: 34548 - DNA, 22 bp, Artificial Sequence
  chemically synthesized
tggaacacatctatatttgtgc

SEQ ID NO: 34549 - DNA, 22 bp, Artificial Sequence
  chemically synthesized
tatttgtgcgaatgcatgaaaa

SEQ ID NO: 34550 - DNA, 22 bp, Artificial Sequence
  chemically synthesized
gtgcgaatgcatgaaaataaag

SEQ ID NO: 34551 - DNA, 22 bp, Artificial Sequence
  chemically synthesized
tgcgaatgcatgaaaataaagt

SEQ ID NO: 34552 - DNA, 22 bp, Artificial Sequence
  chemically synthesized
aaagatatgggtggccttcagg

SEQ ID NO: 34553 - DNA, 22 bp, Artificial Sequence
  chemically synthesized
aagatatgggtggccttcagga

SEQ ID NO: 34554 - DNA, 22 bp, Artificial Sequence
  chemically synthesized
caggagacacgccagcccagca

SEQ ID NO: 34555 - DNA, 22 bp, Artificial Sequence
  chemically synthesized
aggagacacgccagcccagcat

SEQ ID NO: 34556 - DNA, 22 bp, Artificial Sequence
  chemically synthesized
ttcacaatgacacaatggaacc

SEQ ID NO: 34557 - DNA, 22 bp, Artificial Sequence
  chemically synthesized
tcacaatgacacaatggaacct

SEQ ID NO: 34558 - DNA, 22 bp, Artificial Sequence
  chemically synthesized
cacaatgacacaatggaaccta

SEQ ID NO: 34559 - DNA, 22 bp, Artificial Sequence
  chemically synthesized
acaatgacacaatggaacctac

SEQ ID NO: 34560 - DNA, 22 bp, Artificial Sequence
  chemically synthesized
ctctgattgccatctcttcact

SEQ ID NO: 34561 - DNA, 22 bp, Artificial Sequence
  chemically synthesized
tgattgccatctcttcacttta

SEQ ID NO: 34562 - DNA, 22 bp, Artificial Sequence
  chemically synthesized
attgccatctcttcactttaca

SEQ ID NO: 34563 - DNA, 22 bp, Artificial Sequence
  chemically synthesized
ccatctcttcactttacaccca

SEQ ID NO: 34564 - DNA, 22 bp, Artificial Sequence
  chemically synthesized
ttcactttacacccagaggaaa

SEQ ID NO: 34565 - DNA, 22 bp, Artificial Sequence
  chemically synthesized
cactttacacccagaggaaaaa

SEQ ID NO: 34566 - DNA, 22 bp, Artificial Sequence
  chemically synthesized
actttacacccagaggaaaaaa

SEQ ID NO: 34567 - DNA, 22 bp, Artificial Sequence
  chemically synthesized
tacacccagaggaaaaaaaaag

SEQ ID NO: 34568 - DNA, 22 bp, Artificial Sequence
  chemically synthesized
acacccagaggaaaaaaaaagt

SEQ ID NO: 34569 - DNA, 22 bp, Artificial Sequence
  chemically synthesized
cacccagaggaaaaaaaaagtt

SEQ ID NO: 34570 - DNA, 22 bp, Artificial Sequence
  chemically synthesized
aagggtttctcaaccaggtaag

SEQ ID NO: 34571 - DNA, 22 bp, Artificial Sequence
  chemically synthesized
ctcaaccaggtaagtcatggag

SEQ ID NO: 34572 - DNA, 22 bp, Artificial Sequence
  chemically synthesized
tcaaccaggtaagtcatggaga

SEQ ID NO: 34573 - DNA, 22 bp, Artificial Sequence
  chemically synthesized
aaccaggtaagtcatggagagc

SEQ ID NO: 34574 - DNA, 22 bp, Artificial Sequence
  chemically synthesized
aaacttactcttgcaacactca

SEQ ID NO: 34575 - DNA, 22 bp, Artificial Sequence
  chemically synthesized
actcttgcaacactcaacacac

SEQ ID NO: 34576 - DNA, 22 bp, Artificial Sequence
  chemically synthesized
ctcttgcaacactcaacacact

SEQ ID NO: 34577 - DNA, 22 bp, Artificial Sequence
  chemically synthesized
ttgcaacactcaacacacttgt

SEQ ID NO: 34578 - DNA, 22 bp, Artificial Sequence
  chemically synthesized
gcaacactcaacacacttgtga

SEQ ID NO: 34579 - DNA, 22 bp, Artificial Sequence
  chemically synthesized
caacactcaacacacttgtgag

SEQ ID NO: 34580 - DNA, 22 bp, Artificial Sequence
  chemically synthesized
aacacacttgtgagttcttgtg

SEQ ID NO: 34581 - DNA, 22 bp, Artificial Sequence
  chemically synthesized
gtgagttcttgtgcactgtctg

SEQ ID NO: 34582 - DNA, 22 bp, Artificial Sequence
  chemically synthesized
tgagttcttgtgcactgtctgg

SEQ ID NO: 34583 - DNA, 22 bp, Artificial Sequence
  chemically synthesized
ttgtgcactgtctggctttttt

SEQ ID NO: 34584 - DNA, 22 bp, Artificial Sequence
  chemically synthesized
gtgcactgtctggcttttttgc

SEQ ID NO: 34585 - DNA, 22 bp, Artificial Sequence
  chemically synthesized
tgcactgtctggcttttttgct

SEQ ID NO: 34586 - DNA, 22 bp, Artificial Sequence
  chemically synthesized
tctggcttttttgctagcctat

SEQ ID NO: 34587 - DNA, 22 bp, Artificial Sequence
  chemically synthesized
gcttttttgctagcctataagc

SEQ ID NO: 34588 - DNA, 22 bp, Artificial Sequence
  chemically synthesized
ttttgctagcctataagctgca

SEQ ID NO: 34589 - DNA, 22 bp, Artificial Sequence
  chemically synthesized
tttgctagcctataagctgcat

SEQ ID NO: 34590 - DNA, 22 bp, Artificial Sequence
  chemically synthesized
ttgctagcctataagctgcatg

SEQ ID NO: 34591 - DNA, 22 bp, Artificial Sequence
  chemically synthesized
tgctagcctataagctgcatga

SEQ ID NO: 34592 - DNA, 22 bp, Artificial Sequence
  chemically synthesized
gctagcctataagctgcatgaa

SEQ ID NO: 34593 - DNA, 22 bp, Artificial Sequence
  chemically synthesized
ctagcctataagctgcatgaag

SEQ ID NO: 34594 - DNA, 22 bp, Artificial Sequence
  chemically synthesized
gcctataagctgcatgaaggct

SEQ ID NO: 34595 - DNA, 22 bp, Artificial Sequence
  chemically synthesized
taagctgcatgaaggctgagac

SEQ ID NO: 34596 - DNA, 22 bp, Artificial Sequence
  chemically synthesized
catgaaggctgagactatggca

SEQ ID NO: 34597 - DNA, 22 bp, Artificial Sequence
  chemically synthesized
agactatggcagtcttggctca

SEQ ID NO: 34598 - DNA, 22 bp, Artificial Sequence
  chemically synthesized
tggcagtcttggctcatagaag

SEQ ID NO: 34599 - DNA, 22 bp, Artificial Sequence
  chemically synthesized
ggctcatagaaggtaatcagtg

SEQ ID NO: 34600 - DNA, 22 bp, Artificial Sequence
  chemically synthesized
gctcatagaaggtaatcagtgg

SEQ ID NO: 34601 - DNA, 22 bp, Artificial Sequence
  chemically synthesized
atagaaggtaatcagtggaaat

SEQ ID NO: 34602 - DNA, 22 bp, Artificial Sequence
  chemically synthesized
gtcgattgattgaatttttccc

SEQ ID NO: 34603 - DNA, 22 bp, Artificial Sequence
  chemically synthesized
tcgattgattgaatttttccct

SEQ ID NO: 34604 - DNA, 22 bp, Artificial Sequence
  chemically synthesized
attgaatttttcccttaaagcc

SEQ ID NO: 34605 - DNA, 22 bp, Artificial Sequence
  chemically synthesized
aatttttcccttaaagccaatt

SEQ ID NO: 34606 - DNA, 22 bp, Artificial Sequence
  chemically synthesized
ttcccttaaagccaattctaat

SEQ ID NO: 34607 - DNA, 22 bp, Artificial Sequence
  chemically synthesized
tcccttaaagccaattctaatg

SEQ ID NO: 34608 - DNA, 22 bp, Artificial Sequence
  chemically synthesized
cccttaaagccaattctaatgt

SEQ ID NO: 34609 - DNA, 22 bp, Artificial Sequence
  chemically synthesized
ccttaaagccaattctaatgta

SEQ ID NO: 34610 - DNA, 22 bp, Artificial Sequence
  chemically synthesized
aaagccaattctaatgtaagtg

SEQ ID NO: 34611 - DNA, 22 bp, Artificial Sequence
  chemically synthesized
aagccaattctaatgtaagtgt

SEQ ID NO: 34612 - DNA, 22 bp, Artificial Sequence
  chemically synthesized
taatgtaagtgtatgtgtgctg

SEQ ID NO: 34613 - DNA, 22 bp, Artificial Sequence
  chemically synthesized
atgtaagtgtatgtgtgctgct

SEQ ID NO: 34614 - DNA, 22 bp, Artificial Sequence
  chemically synthesized
ctgtaaatagggttagaaccct

SEQ ID NO: 34615 - DNA, 22 bp, Artificial Sequence
  chemically synthesized
taaatagggttagaaccctttt

SEQ ID NO: 34616 - DNA, 22 bp, Artificial Sequence
  chemically synthesized
gaaccctttttgctctaactta

SEQ ID NO: 34617 - DNA, 22 bp, Artificial Sequence
  chemically synthesized
tttgctctaacttaaataccaa

SEQ ID NO: 34618 - DNA, 22 bp, Artificial Sequence
  chemically synthesized
ttgctctaacttaaataccaat

SEQ ID NO: 34619 - DNA, 22 bp, Artificial Sequence
  chemically synthesized
tgctctaacttaaataccaatt

SEQ ID NO: 34620 - DNA, 22 bp, Artificial Sequence
  chemically synthesized
gctctaacttaaataccaattg

SEQ ID NO: 34621 - DNA, 22 bp, Artificial Sequence
  chemically synthesized
ctctaacttaaataccaattga

SEQ ID NO: 34622 - DNA, 22 bp, Artificial Sequence
  chemically synthesized
taacttaaataccaattgattt

SEQ ID NO: 34623 - DNA, 22 bp, Artificial Sequence
  chemically synthesized
acttaaataccaattgatttta

SEQ ID NO: 34624 - DNA, 22 bp, Artificial Sequence
  chemically synthesized
aaataccaattgattttagccc

SEQ ID NO: 34625 - DNA, 22 bp, Artificial Sequence
  chemically synthesized
aataccaattgattttagccca

SEQ ID NO: 34626 - DNA, 22 bp, Artificial Sequence
  chemically synthesized
attttagcccaggataatgaaa

SEQ ID NO: 34627 - DNA, 22 bp, Artificial Sequence
  chemically synthesized
tagcccaggataatgaaaatgc

SEQ ID NO: 34628 - DNA, 22 bp, Artificial Sequence
  chemically synthesized
agcccaggataatgaaaatgca

SEQ ID NO: 34629 - DNA, 22 bp, Artificial Sequence
  chemically synthesized
gcccaggataatgaaaatgcag

SEQ ID NO: 34630 - DNA, 22 bp, Artificial Sequence
  chemically synthesized
gctcagcaagcgaaatgtaacc

SEQ ID NO: 34631 - DNA, 22 bp, Artificial Sequence
  chemically synthesized
ctcagcaagcgaaatgtaacca

SEQ ID NO: 34632 - DNA, 22 bp, Artificial Sequence
  chemically synthesized
agcaagcgaaatgtaaccatct

SEQ ID NO: 34633 - DNA, 22 bp, Artificial Sequence
  chemically synthesized
aacacagctccttaagagatat

SEQ ID NO: 34634 - DNA, 22 bp, Artificial Sequence
  chemically synthesized
cttaagagatataagaagggtg

SEQ ID NO: 34635 - DNA, 22 bp, Artificial Sequence
  chemically synthesized
aagagatataagaagggtggaa

SEQ ID NO: 34636 - DNA, 22 bp, Artificial Sequence
  chemically synthesized
agagatataagaagggtggaag

SEQ ID NO: 34637 - DNA, 22 bp, Artificial Sequence
  chemically synthesized
cagagttctcagttgttgcggg

SEQ ID NO: 34638 - DNA, 22 bp, Artificial Sequence
  chemically synthesized
tcagttgttgcgggaagtctgg

SEQ ID NO: 34639 - DNA, 22 bp, Artificial Sequence
  chemically synthesized
agttgttgcgggaagtctggga

SEQ ID NO: 34640 - DNA, 22 bp, Artificial Sequence
  chemically synthesized
ttgcgggaagtctgggactcca

SEQ ID NO: 34641 - DNA, 22 bp, Artificial Sequence
  chemically synthesized
cgggaagtctgggactccaaac

SEQ ID NO: 34642 - DNA, 22 bp, Artificial Sequence
  chemically synthesized
ggactccaaacggagggatcag

SEQ ID NO: 34643 - DNA, 22 bp, Artificial Sequence
  chemically synthesized
caaacggagggatcagctgaag

SEQ ID NO: 34644 - DNA, 22 bp, Artificial Sequence
  chemically synthesized
aagccatggcagaagttcgtgg

SEQ ID NO: 34645 - DNA, 22 bp, Artificial Sequence
  chemically synthesized
gtggattgtgaagatttcatgg

SEQ ID NO: 34646 - DNA, 22 bp, Artificial Sequence
  chemically synthesized
tgaagatttcatggacatttat

SEQ ID NO: 34647 - DNA, 22 bp, Artificial Sequence
  chemically synthesized
catggacatttattagttcccc

SEQ ID NO: 34648 - DNA, 22 bp, Artificial Sequence
  chemically synthesized
atggacatttattagttcccca

SEQ ID NO: 34649 - DNA, 22 bp, Artificial Sequence
  chemically synthesized
attagttccccaaattaatact

SEQ ID NO: 34650 - DNA, 22 bp, Artificial Sequence
  chemically synthesized
ttagttccccaaattaatactt

SEQ ID NO: 34651 - DNA, 22 bp, Artificial Sequence
  chemically synthesized
gttccccaaattaatacttttg

SEQ ID NO: 34652 - DNA, 22 bp, Artificial Sequence
  chemically synthesized
cccaaattaatacttttgtaat

SEQ ID NO: 34653 - DNA, 22 bp, Artificial Sequence
  chemically synthesized
atacttttgtaatttcttatgc

SEQ ID NO: 34654 - DNA, 22 bp, Artificial Sequence
  chemically synthesized
ttgtaatttcttatgcctgtct

SEQ ID NO: 34655 - DNA, 22 bp, Artificial Sequence
  chemically synthesized
tgtaatttcttatgcctgtctt

SEQ ID NO: 34656 - DNA, 22 bp, Artificial Sequence
  chemically synthesized
gtaatttcttatgcctgtcttt

SEQ ID NO: 34657 - DNA, 22 bp, Artificial Sequence
  chemically synthesized
taatttcttatgcctgtcttta

SEQ ID NO: 34658 - DNA, 22 bp, Artificial Sequence
  chemically synthesized
cttatgcctgtctttactgcaa

SEQ ID NO: 34659 - DNA, 22 bp, Artificial Sequence
  chemically synthesized
ttatgcctgtctttactgcaat

SEQ ID NO: 34660 - DNA, 22 bp, Artificial Sequence
  chemically synthesized
atgcctgtctttactgcaatct

SEQ ID NO: 34661 - DNA, 22 bp, Artificial Sequence
  chemically synthesized
tgcctgtctttactgcaatctc

SEQ ID NO: 34662 - DNA, 22 bp, Artificial Sequence
  chemically synthesized
tctttactgcaatctctaaaca

SEQ ID NO: 34663 - DNA, 22 bp, Artificial Sequence
  chemically synthesized
tactgcaatctctaaacataaa

SEQ ID NO: 34664 - DNA, 22 bp, Artificial Sequence
  chemically synthesized
actgcaatctctaaacataaat

SEQ ID NO: 34665 - DNA, 22 bp, Artificial Sequence
  chemically synthesized
ctgcaatctctaaacataaatt

SEQ ID NO: 34666 - DNA, 22 bp, Artificial Sequence
  chemically synthesized
caatctctaaacataaattgta

SEQ ID NO: 34667 - DNA, 22 bp, Artificial Sequence
  chemically synthesized
taaacataaattgtaaagattt

SEQ ID NO: 34668 - DNA, 22 bp, Artificial Sequence
  chemically synthesized
aacataaattgtaaagatttca

SEQ ID NO: 34669 - DNA, 22 bp, Artificial Sequence
  chemically synthesized
taaagatttcatggacacttat

SEQ ID NO: 34670 - DNA, 22 bp, Artificial Sequence
  chemically synthesized
catggacacttatcacttcccc

SEQ ID NO: 34671 - DNA, 22 bp, Artificial Sequence
  chemically synthesized
atggacacttatcacttcccca

SEQ ID NO: 34672 - DNA, 22 bp, Artificial Sequence
  chemically synthesized
atcacttccccagtcaatatcc

SEQ ID NO: 34673 - DNA, 22 bp, Artificial Sequence
  chemically synthesized
tcacttccccagtcaatatcct

SEQ ID NO: 34674 - DNA, 22 bp, Artificial Sequence
  chemically synthesized
ccccagtcaatatccttgtgat

SEQ ID NO: 34675 - DNA, 22 bp, Artificial Sequence
  chemically synthesized
cccagtcaatatccttgtgatt

SEQ ID NO: 34676 - DNA, 22 bp, Artificial Sequence
  chemically synthesized
gtgatttatgcctgtctttact

SEQ ID NO: 34677 - DNA, 22 bp, Artificial Sequence
  chemically synthesized
tgatttatgcctgtctttactt

SEQ ID NO: 34678 - DNA, 22 bp, Artificial Sequence
  chemically synthesized
atgcctgtctttactttaatct

SEQ ID NO: 34679 - DNA, 22 bp, Artificial Sequence
  chemically synthesized
tgcctgtctttactttaatctc

SEQ ID NO: 34680 - DNA, 22 bp, Artificial Sequence
  chemically synthesized
tctttactttaatctcttaatc

SEQ ID NO: 34681 - DNA, 22 bp, Artificial Sequence
  chemically synthesized
tactttaatctcttaatcctgt

SEQ ID NO: 34682 - DNA, 22 bp, Artificial Sequence
  chemically synthesized
actttaatctcttaatcctgtc

SEQ ID NO: 34683 - DNA, 22 bp, Artificial Sequence
  chemically synthesized
ctttaatctcttaatcctgtca

SEQ ID NO: 34684 - DNA, 22 bp, Artificial Sequence
  chemically synthesized
taatctcttaatcctgtcagct

SEQ ID NO: 34685 - DNA, 22 bp, Artificial Sequence
  chemically synthesized
aatctcttaatcctgtcagctg

SEQ ID NO: 34686 - DNA, 22 bp, Artificial Sequence
  chemically synthesized
atctcttaatcctgtcagctga

SEQ ID NO: 34687 - DNA, 22 bp, Artificial Sequence
  chemically synthesized
ttaatcctgtcagctgaggagg

SEQ ID NO: 34688 - DNA, 22 bp, Artificial Sequence
  chemically synthesized
aatcctgtcagctgaggaggat

SEQ ID NO: 34689 - DNA, 22 bp, Artificial Sequence
  chemically synthesized
atcctgtcagctgaggaggatg

SEQ ID NO: 34690 - DNA, 22 bp, Artificial Sequence
  chemically synthesized
tcagctgaggaggatgtatatt

SEQ ID NO: 34691 - DNA, 22 bp, Artificial Sequence
  chemically synthesized
aggaggatgtatattgcctcag

SEQ ID NO: 34692 - DNA, 22 bp, Artificial Sequence
  chemically synthesized
cctcaggaccctgtaataattg

SEQ ID NO: 34693 - DNA, 22 bp, Artificial Sequence
  chemically synthesized
aggaccctgtaataattgcatt

SEQ ID NO: 34694 - DNA, 22 bp, Artificial Sequence
  chemically synthesized
taataattgcattaactgcaca

SEQ ID NO: 34695 - DNA, 22 bp, Artificial Sequence
  chemically synthesized
cattaactgcacaaattgtaca

SEQ ID NO: 34696 - DNA, 22 bp, Artificial Sequence
  chemically synthesized
actgcacaaattgtacagcatg

SEQ ID NO: 34697 - DNA, 22 bp, Artificial Sequence
  chemically synthesized
cacaaattgtacagcatgtgtg

SEQ ID NO: 34698 - DNA, 22 bp, Artificial Sequence
  chemically synthesized
tacagcatgtgtgtttgagcaa

SEQ ID NO: 34699 - DNA, 22 bp, Artificial Sequence
  chemically synthesized
gagcaacatgaaatgtggacac

SEQ ID NO: 34700 - DNA, 22 bp, Artificial Sequence
  chemically synthesized
agcaacatgaaatgtggacacc

SEQ ID NO: 34701 - DNA, 22 bp, Artificial Sequence
  chemically synthesized
gaaaaaagaacaggataacagc

SEQ ID NO: 34702 - DNA, 22 bp, Artificial Sequence
  chemically synthesized
aaaaaagaacaggataacagca

SEQ ID NO: 34703 - DNA, 22 bp, Artificial Sequence
  chemically synthesized
ttcagggaataagagagataac

SEQ ID NO: 34704 - DNA, 22 bp, Artificial Sequence
  chemically synthesized
agggaataagagagataacctt

SEQ ID NO: 34705 - DNA, 22 bp, Artificial Sequence
  chemically synthesized
aaactctgactgctggtgagcc

SEQ ID NO: 34706 - DNA, 22 bp, Artificial Sequence
  chemically synthesized
aactctgactgctggtgagcca

SEQ ID NO: 34707 - DNA, 22 bp, Artificial Sequence
  chemically synthesized
tgactgctggtgagccaggcag

SEQ ID NO: 34708 - DNA, 22 bp, Artificial Sequence
  chemically synthesized
actgctggtgagccaggcagaa

SEQ ID NO: 34709 - DNA, 22 bp, Artificial Sequence
  chemically synthesized
ctggtgagccaggcagaacaga

SEQ ID NO: 34710 - DNA, 22 bp, Artificial Sequence
  chemically synthesized
gtgagccaggcagaacagagcc

SEQ ID NO: 34711 - DNA, 22 bp, Artificial Sequence
  chemically synthesized
ctcttctttcaaaagcaaatgg

SEQ ID NO: 34712 - DNA, 22 bp, Artificial Sequence
  chemically synthesized
tcttctttcaaaagcaaatggg

SEQ ID NO: 34713 - DNA, 22 bp, Artificial Sequence
  chemically synthesized
ttctttcaaaagcaaatgggag

SEQ ID NO: 34714 - DNA, 22 bp, Artificial Sequence
  chemically synthesized
ctttcaaaagcaaatgggagaa

SEQ ID NO: 34715 - DNA, 22 bp, Artificial Sequence
  chemically synthesized
tttcaaaagcaaatgggagaaa

SEQ ID NO: 34716 - DNA, 22 bp, Artificial Sequence
  chemically synthesized
tcaaaagcaaatgggagaaata

SEQ ID NO: 34717 - DNA, 22 bp, Artificial Sequence
  chemically synthesized
caaaagcaaatgggagaaatat

SEQ ID NO: 34718 - DNA, 22 bp, Artificial Sequence
  chemically synthesized
aaaagcaaatgggagaaatatc

SEQ ID NO: 34719 - DNA, 22 bp, Artificial Sequence
  chemically synthesized
aattctttttctcagcatggaa

SEQ ID NO: 34720 - DNA, 22 bp, Artificial Sequence
  chemically synthesized
tttttctcagcatggaacatcc

SEQ ID NO: 34721 - DNA, 22 bp, Artificial Sequence
  chemically synthesized
tttctcagcatggaacatccct

SEQ ID NO: 34722 - DNA, 22 bp, Artificial Sequence
  chemically synthesized
ttctcagcatggaacatccctg

SEQ ID NO: 34723 - DNA, 22 bp, Artificial Sequence
  chemically synthesized
tctcagcatggaacatccctga

SEQ ID NO: 34724 - DNA, 22 bp, Artificial Sequence
  chemically synthesized
ctcagcatggaacatccctgag

SEQ ID NO: 34725 - DNA, 22 bp, Artificial Sequence
  chemically synthesized
tcagcatggaacatccctgaga

SEQ ID NO: 34726 - DNA, 22 bp, Artificial Sequence
  chemically synthesized
agcatggaacatccctgagaaa

SEQ ID NO: 34727 - DNA, 22 bp, Artificial Sequence
  chemically synthesized
agaaagagaatacgagccagga

SEQ ID NO: 34728 - DNA, 22 bp, Artificial Sequence
  chemically synthesized
ataaacagcccccctccaggtg

SEQ ID NO: 34729 - DNA, 22 bp, Artificial Sequence
  chemically synthesized
taaacagcccccctccaggtgc

SEQ ID NO: 34730 - DNA, 22 bp, Artificial Sequence
  chemically synthesized
caggtgcgcctgtctcttatgg

SEQ ID NO: 34731 - DNA, 22 bp, Artificial Sequence
  chemically synthesized
tctcttatggtcgagactgcag

SEQ ID NO: 34732 - DNA, 22 bp, Artificial Sequence
  chemically synthesized
ttatggtcgagactgcaggggt

SEQ ID NO: 34733 - DNA, 22 bp, Artificial Sequence
  chemically synthesized
atggtcgagactgcaggggtga

SEQ ID NO: 34734 - DNA, 22 bp, Artificial Sequence
  chemically synthesized
tggtcgagactgcaggggtgaa

SEQ ID NO: 34735 - DNA, 22 bp, Artificial Sequence
  chemically synthesized
caggggtgaaatagaccccagt

SEQ ID NO: 34736 - DNA, 22 bp, Artificial Sequence
  chemically synthesized
ccacagcgctcccaggcttatt

SEQ ID NO: 34737 - DNA, 22 bp, Artificial Sequence
  chemically synthesized
ccaggcttattaggaagaggaa

SEQ ID NO: 34738 - DNA, 22 bp, Artificial Sequence
  chemically synthesized
attaggaagaggaaattcccgc

SEQ ID NO: 34739 - DNA, 22 bp, Artificial Sequence
  chemically synthesized
ttaggaagaggaaattcccgcc

SEQ ID NO: 34740 - DNA, 22 bp, Artificial Sequence
  chemically synthesized
ggaagaggaaattcccgcctaa

SEQ ID NO: 34741 - DNA, 22 bp, Artificial Sequence
  chemically synthesized
ccgcctaataaattttggtcag

SEQ ID NO: 34742 - DNA, 22 bp, Artificial Sequence
  chemically synthesized
ataaattttggtcagaccagtt

SEQ ID NO: 34743 - DNA, 22 bp, Artificial Sequence
  chemically synthesized
tggtcagaccagttgatcctaa

SEQ ID NO: 34744 - DNA, 22 bp, Artificial Sequence
  chemically synthesized
ggtcagaccagttgatcctaaa

SEQ ID NO: 34745 - DNA, 22 bp, Artificial Sequence
  chemically synthesized
gtcagaccagttgatcctaaaa

SEQ ID NO: 34746 - DNA, 22 bp, Artificial Sequence
  chemically synthesized
atcctaaaaaccctgtctcctg

SEQ ID NO: 34747 - DNA, 22 bp, Artificial Sequence
  chemically synthesized
aaaaccctgtctcctgataaga

SEQ ID NO: 34748 - DNA, 22 bp, Artificial Sequence
  chemically synthesized
tctcctgataagatgttatcaa

SEQ ID NO: 34749 - DNA, 22 bp, Artificial Sequence
  chemically synthesized
ctgataagatgttatcaatgac

SEQ ID NO: 34750 - DNA, 22 bp, Artificial Sequence
  chemically synthesized
ataagatgttatcaatgacaat

SEQ ID NO: 34751 - DNA, 22 bp, Artificial Sequence
  chemically synthesized
tcaatgacaatggtgcccgaaa

SEQ ID NO: 34752 - DNA, 22 bp, Artificial Sequence
  chemically synthesized
cattagcaattttaatttcgcc

SEQ ID NO: 34753 - DNA, 22 bp, Artificial Sequence
  chemically synthesized
attagcaattttaatttcgcct

SEQ ID NO: 34754 - DNA, 22 bp, Artificial Sequence
  chemically synthesized
gcaattttaatttcgcctcggt

SEQ ID NO: 34755 - DNA, 22 bp, Artificial Sequence
  chemically synthesized
taatttcgcctcggtcctgtgg

SEQ ID NO: 34756 - DNA, 22 bp, Artificial Sequence
  chemically synthesized
aatttcgcctcggtcctgtggt

SEQ ID NO: 34757 - DNA, 22 bp, Artificial Sequence
  chemically synthesized
atttcgcctcggtcctgtggtc

SEQ ID NO: 34758 - DNA, 22 bp, Artificial Sequence
  chemically synthesized
cgcctcggtcctgtggtcctgt

SEQ ID NO: 34759 - DNA, 22 bp, Artificial Sequence
  chemically synthesized
gcctcggtcctgtggtcctgtg

SEQ ID NO: 34760 - DNA, 22 bp, Artificial Sequence
  chemically synthesized
ggtcctgtggtcctgtgatctc

SEQ ID NO: 34761 - DNA, 22 bp, Artificial Sequence
  chemically synthesized
tggtcctgtgatctcaccctgc

SEQ ID NO: 34762 - DNA, 22 bp, Artificial Sequence
  chemically synthesized
tgatctcaccctgcctccactt

SEQ ID NO: 34763 - DNA, 22 bp, Artificial Sequence
  chemically synthesized
accctgcctccacttgccttgt

SEQ ID NO: 34764 - DNA, 22 bp, Artificial Sequence
  chemically synthesized
cctccacttgccttgtgatatt

SEQ ID NO: 34765 - DNA, 22 bp, Artificial Sequence
  chemically synthesized
cacttgccttgtgatattctat

SEQ ID NO: 34766 - DNA, 22 bp, Artificial Sequence
  chemically synthesized
gccttgtgatattctattacct

SEQ ID NO: 34767 - DNA, 22 bp, Artificial Sequence
  chemically synthesized
ccttgtgatattctattacctt

SEQ ID NO: 34768 - DNA, 22 bp, Artificial Sequence
  chemically synthesized
gtgatattctattaccttgtaa

SEQ ID NO: 34769 - DNA, 22 bp, Artificial Sequence
  chemically synthesized
tgatattctattaccttgtaaa

SEQ ID NO: 34770 - DNA, 22 bp, Artificial Sequence
  chemically synthesized
tattaccttgtaaagtacttga

SEQ ID NO: 34771 - DNA, 22 bp, Artificial Sequence
  chemically synthesized
ttaccttgtaaagtacttgatg

SEQ ID NO: 34772 - DNA, 22 bp, Artificial Sequence
  chemically synthesized
ccttgtaaagtacttgatgtct

SEQ ID NO: 34773 - DNA, 22 bp, Artificial Sequence
  chemically synthesized
gtaaagtacttgatgtctgtga

SEQ ID NO: 34774 - DNA, 22 bp, Artificial Sequence
  chemically synthesized
taaagtacttgatgtctgtgac

SEQ ID NO: 34775 - DNA, 22 bp, Artificial Sequence
  chemically synthesized
gatgtctgtgacccacacctat

SEQ ID NO: 34776 - DNA, 22 bp, Artificial Sequence
  chemically synthesized
atgtctgtgacccacacctatt

SEQ ID NO: 34777 - DNA, 22 bp, Artificial Sequence
  chemically synthesized
tgacccacacctatttgcacac

SEQ ID NO: 34778 - DNA, 22 bp, Artificial Sequence
  chemically synthesized
tttgcacactgcctccccattt

SEQ ID NO: 34779 - DNA, 22 bp, Artificial Sequence
  chemically synthesized
gcacactgcctccccatttgaa

SEQ ID NO: 34780 - DNA, 22 bp, Artificial Sequence
  chemically synthesized
cacactgcctccccatttgaaa

SEQ ID NO: 34781 - DNA, 22 bp, Artificial Sequence
  chemically synthesized
cctccccatttgaaaatcccta

SEQ ID NO: 34782 - DNA, 22 bp, Artificial Sequence
  chemically synthesized
cccatttgaaaatccctaatac

SEQ ID NO: 34783 - DNA, 22 bp, Artificial Sequence
  chemically synthesized
gaaaatccctaatacaaacttg

SEQ ID NO: 34784 - DNA, 22 bp, Artificial Sequence
  chemically synthesized
aaaatccctaatacaaacttgc

SEQ ID NO: 34785 - DNA, 22 bp, Artificial Sequence
  chemically synthesized
atacaaacttgctggtttttgt

SEQ ID NO: 34786 - DNA, 22 bp, Artificial Sequence
  chemically synthesized
gctggtttttgtggcttgtggg

SEQ ID NO: 34787 - DNA, 22 bp, Artificial Sequence
  chemically synthesized
ctggtttttgtggcttgtgggg

SEQ ID NO: 34788 - DNA, 22 bp, Artificial Sequence
  chemically synthesized
gtttttgtggcttgtggggcat

SEQ ID NO: 34789 - DNA, 22 bp, Artificial Sequence
  chemically synthesized
ttgtggcttgtggggcatcacg

SEQ ID NO: 34790 - DNA, 22 bp, Artificial Sequence
  chemically synthesized
tgtggcttgtggggcatcacgg

SEQ ID NO: 34791 - DNA, 22 bp, Artificial Sequence
  chemically synthesized
gtggcttgtggggcatcacgga

SEQ ID NO: 34792 - DNA, 22 bp, Artificial Sequence
  chemically synthesized
tggcttgtggggcatcacggaa

SEQ ID NO: 34793 - DNA, 22 bp, Artificial Sequence
  chemically synthesized
gtggggcatcacggaacctacc

SEQ ID NO: 34794 - DNA, 22 bp, Artificial Sequence
  chemically synthesized
tggggcatcacggaacctaccg

SEQ ID NO: 34795 - DNA, 22 bp, Artificial Sequence
  chemically synthesized
ccgaaatgtgatgcctcccccg

SEQ ID NO: 34796 - DNA, 22 bp, Artificial Sequence
  chemically synthesized
ccccggatgcccggctttaaaa

SEQ ID NO: 34797 - DNA, 22 bp, Artificial Sequence
  chemically synthesized
taaaatttctctcttttgtact

SEQ ID NO: 34798 - DNA, 22 bp, Artificial Sequence
  chemically synthesized
aaaatttctctcttttgtactc

SEQ ID NO: 34799 - DNA, 22 bp, Artificial Sequence
  chemically synthesized
aaatttctctcttttgtactct

SEQ ID NO: 34800 - DNA, 22 bp, Artificial Sequence
  chemically synthesized
ctctcttttgtactctgtccct

SEQ ID NO: 34801 - DNA, 22 bp, Artificial Sequence
  chemically synthesized
tctcttttgtactctgtccctt

SEQ ID NO: 34802 - DNA, 22 bp, Artificial Sequence
  chemically synthesized
tcttttgtactctgtcccttta

SEQ ID NO: 34803 - DNA, 22 bp, Artificial Sequence
  chemically synthesized
ttttgtactctgtccctttatt

SEQ ID NO: 34804 - DNA, 22 bp, Artificial Sequence
  chemically synthesized
ttgtactctgtccctttatttc

SEQ ID NO: 34805 - DNA, 22 bp, Artificial Sequence
  chemically synthesized
tgtactctgtccctttatttct

SEQ ID NO: 34806 - DNA, 22 bp, Artificial Sequence
  chemically synthesized
gtactctgtccctttatttcta

SEQ ID NO: 34807 - DNA, 22 bp, Artificial Sequence
  chemically synthesized
tactctgtccctttatttctaa

SEQ ID NO: 34808 - DNA, 22 bp, Artificial Sequence
  chemically synthesized
tgtccctttatttctaaagttg

SEQ ID NO: 34809 - DNA, 22 bp, Artificial Sequence
  chemically synthesized
tccctttatttctaaagttggc

SEQ ID NO: 34810 - DNA, 22 bp, Artificial Sequence
  chemically synthesized
tatttctaaagttggccgacgc

SEQ ID NO: 34811 - DNA, 22 bp, Artificial Sequence
  chemically synthesized
atttctaaagttggccgacgct

SEQ ID NO: 34812 - DNA, 22 bp, Artificial Sequence
  chemically synthesized
tttctaaagttggccgacgctt

SEQ ID NO: 34813 - DNA, 22 bp, Artificial Sequence
  chemically synthesized
ctaaagttggccgacgcttagg

SEQ ID NO: 34814 - DNA, 22 bp, Artificial Sequence
  chemically synthesized
taaagttggccgacgcttaggg

SEQ ID NO: 34815 - DNA, 22 bp, Artificial Sequence
  chemically synthesized
aagttggccgacgcttagggaa

SEQ ID NO: 34816 - DNA, 22 bp, Artificial Sequence
  chemically synthesized
gccgacgcttagggaaaataga

SEQ ID NO: 34817 - DNA, 22 bp, Artificial Sequence
  chemically synthesized
agggaaaatagaaaagaaccta

SEQ ID NO: 34818 - DNA, 22 bp, Artificial Sequence
  chemically synthesized
gggaaaatagaaaagaacctac

SEQ ID NO: 34819 - DNA, 22 bp, Artificial Sequence
  chemically synthesized
cgtgaatattggggcaggttcc

SEQ ID NO: 34820 - DNA, 22 bp, Artificial Sequence
  chemically synthesized
gggcaggttccctgatactcag

SEQ ID NO: 34821 - DNA, 22 bp, Artificial Sequence
  chemically synthesized
cctgatactcagtggcgtggag

SEQ ID NO: 34822 - DNA, 22 bp, Artificial Sequence
  chemically synthesized
atactcagtggcgtggagatgt

SEQ ID NO: 34823 - DNA, 22 bp, Artificial Sequence
  chemically synthesized
agtggcgtggagatgtaacaag

SEQ ID NO: 34824 - DNA, 22 bp, Artificial Sequence
  chemically synthesized
gatgtgtgagtgatgatcaggc

SEQ ID NO: 34825 - DNA, 22 bp, Artificial Sequence
  chemically synthesized
tatttggaagaaatatcagatg

SEQ ID NO: 34826 - DNA, 22 bp, Artificial Sequence
  chemically synthesized
ggaagaaatatcagatgtgaat

SEQ ID NO: 34827 - DNA, 22 bp, Artificial Sequence
  chemically synthesized
gaagaaatatcagatgtgaatg

SEQ ID NO: 34828 - DNA, 22 bp, Artificial Sequence
  chemically synthesized
tgacctaggaagcaatggaagt

SEQ ID NO: 34829 - DNA, 22 bp, Artificial Sequence
  chemically synthesized
ggaagcaatggaagtgaaaaat

SEQ ID NO: 34830 - DNA, 22 bp, Artificial Sequence
  chemically synthesized
ttctttttgccttcagactcaa

SEQ ID NO: 34831 - DNA, 22 bp, Artificial Sequence
  chemically synthesized
tttttgccttcagactcaatat

SEQ ID NO: 34832 - DNA, 22 bp, Artificial Sequence
  chemically synthesized
tttgccttcagactcaatattt

SEQ ID NO: 34833 - DNA, 22 bp, Artificial Sequence
  chemically synthesized
ttgccttcagactcaatatttt

SEQ ID NO: 34834 - DNA, 22 bp, Artificial Sequence
  chemically synthesized
tgccttcagactcaatattttg

SEQ ID NO: 34835 - DNA, 22 bp, Artificial Sequence
  chemically synthesized
gccttcagactcaatattttgt

SEQ ID NO: 34836 - DNA, 22 bp, Artificial Sequence
  chemically synthesized
ccttcagactcaatattttgta

SEQ ID NO: 34837 - DNA, 22 bp, Artificial Sequence
  chemically synthesized
cagactcaatattttgtatatt

SEQ ID NO: 34838 - DNA, 22 bp, Artificial Sequence
  chemically synthesized
agactcaatattttgtatattt

SEQ ID NO: 34839 - DNA, 22 bp, Artificial Sequence
  chemically synthesized
aatattttgtatatttgaaaat

SEQ ID NO: 34840 - DNA, 22 bp, Artificial Sequence
  chemically synthesized
tgtatatttgaaaatttgtcaa

SEQ ID NO: 34841 - DNA, 22 bp, Artificial Sequence
  chemically synthesized
gtatatttgaaaatttgtcaac

SEQ ID NO: 34842 - DNA, 22 bp, Artificial Sequence
  chemically synthesized
tatatttgaaaatttgtcaaca

SEQ ID NO: 34843 - DNA, 22 bp, Artificial Sequence
  chemically synthesized
gaaaatttgtcaacacaaaaaa

SEQ ID NO: 34844 - DNA, 22 bp, Artificial Sequence
  chemically synthesized
aaaatttgtcaacacaaaaaat

SEQ ID NO: 34845 - DNA, 22 bp, Artificial Sequence
  chemically synthesized
gtcaacacaaaaaatactaagt

SEQ ID NO: 34846 - DNA, 22 bp, Artificial Sequence
  chemically synthesized
tcaacacaaaaaatactaagtt

SEQ ID NO: 34847 - DNA, 22 bp, Artificial Sequence
  chemically synthesized
agttgtatactgatttgttaaa

SEQ ID NO: 34848 - DNA, 22 bp, Artificial Sequence
  chemically synthesized
tatactgatttgttaaaagcag

SEQ ID NO: 34849 - DNA, 22 bp, Artificial Sequence
  chemically synthesized
atttgttaaaagcagcagcatg

SEQ ID NO: 34850 - DNA, 22 bp, Artificial Sequence
  chemically synthesized
gttaaaagcagcagcatgcagt

SEQ ID NO: 34851 - DNA, 22 bp, Artificial Sequence
  chemically synthesized
ttaaaagcagcagcatgcagtt

SEQ ID NO: 34852 - DNA, 22 bp, Artificial Sequence
  chemically synthesized
aaagcagcagcatgcagttagg

SEQ ID NO: 34853 - DNA, 22 bp, Artificial Sequence
  chemically synthesized
ggatgatatctttggggaaatg

SEQ ID NO: 34854 - DNA, 22 bp, Artificial Sequence
  chemically synthesized
tggggaaatggcagagaccatc

SEQ ID NO: 34855 - DNA, 22 bp, Artificial Sequence
  chemically synthesized
ggggaaatggcagagaccatcc

SEQ ID NO: 34856 - DNA, 22 bp, Artificial Sequence
  chemically synthesized
gggaaatggcagagaccatcca

SEQ ID NO: 34857 - DNA, 22 bp, Artificial Sequence
  chemically synthesized
tgattctccactgcatccaatt

SEQ ID NO: 34858 - DNA, 22 bp, Artificial Sequence
  chemically synthesized
attctccactgcatccaatttt

SEQ ID NO: 34859 - DNA, 22 bp, Artificial Sequence
  chemically synthesized
tccactgcatccaattttctac

SEQ ID NO: 34860 - DNA, 22 bp, Artificial Sequence
  chemically synthesized
cactgcatccaattttctactc

SEQ ID NO: 34861 - DNA, 22 bp, Artificial Sequence
  chemically synthesized
catccaattttctactctcaaa

SEQ ID NO: 34862 - DNA, 22 bp, Artificial Sequence
  chemically synthesized
tctactctcaaaatgaacccca

SEQ ID NO: 34863 - DNA, 22 bp, Artificial Sequence
  chemically synthesized
ctactctcaaaatgaaccccat

SEQ ID NO: 34864 - DNA, 22 bp, Artificial Sequence
  chemically synthesized
tactctcaaaatgaaccccatg

SEQ ID NO: 34865 - DNA, 22 bp, Artificial Sequence
  chemically synthesized
ctctcaaaatgaaccccatgct

SEQ ID NO: 34866 - DNA, 22 bp, Artificial Sequence
  chemically synthesized
tcaaaatgaaccccatgctcac

SEQ ID NO: 34867 - DNA, 22 bp, Artificial Sequence
  chemically synthesized
aaaatgaaccccatgctcacca

SEQ ID NO: 34868 - DNA, 22 bp, Artificial Sequence
  chemically synthesized
accatcaacgggattgaatttg

SEQ ID NO: 34869 - DNA, 22 bp, Artificial Sequence
  chemically synthesized
aatttgagctgctgagaattgg

SEQ ID NO: 34870 - DNA, 22 bp, Artificial Sequence
  chemically synthesized
gagctgctgagaattggtaata

SEQ ID NO: 34871 - DNA, 22 bp, Artificial Sequence
  chemically synthesized
agctgctgagaattggtaataa

SEQ ID NO: 34872 - DNA, 22 bp, Artificial Sequence
  chemically synthesized
ctgagaattggtaataacccca

SEQ ID NO: 34873 - DNA, 22 bp, Artificial Sequence
  chemically synthesized
agaattggtaataaccccaaat

SEQ ID NO: 34874 - DNA, 22 bp, Artificial Sequence
  chemically synthesized
gtaataaccccaaattatcttc

SEQ ID NO: 34875 - DNA, 22 bp, Artificial Sequence
  chemically synthesized
tcttcaattctgtgaaatggaa

SEQ ID NO: 34876 - DNA, 22 bp, Artificial Sequence
  chemically synthesized
caattctgtgaaatggaatttt

SEQ ID NO: 34877 - DNA, 22 bp, Artificial Sequence
  chemically synthesized
aattctgtgaaatggaatttta

SEQ ID NO: 34878 - DNA, 22 bp, Artificial Sequence
  chemically synthesized
tgtgaaatggaattttagacca

SEQ ID NO: 34879 - DNA, 22 bp, Artificial Sequence
  chemically synthesized
tgaaatggaattttagaccagc

SEQ ID NO: 34880 - DNA, 22 bp, Artificial Sequence
  chemically synthesized
tagaccagcctgtgactgaagc

SEQ ID NO: 34881 - DNA, 22 bp, Artificial Sequence
  chemically synthesized
agaccagcctgtgactgaagcc

SEQ ID NO: 34882 - DNA, 22 bp, Artificial Sequence
  chemically synthesized
gaccagcctgtgactgaagcca

SEQ ID NO: 34883 - DNA, 22 bp, Artificial Sequence
  chemically synthesized
tgactgaagccactgggcatta

SEQ ID NO: 34884 - DNA, 22 bp, Artificial Sequence
  chemically synthesized
aagccactgggcattacagtgc

SEQ ID NO: 34885 - DNA, 22 bp, Artificial Sequence
  chemically synthesized
ggcattacagtgccttcgcttt

SEQ ID NO: 34886 - DNA, 22 bp, Artificial Sequence
  chemically synthesized
cagtgccttcgctttgttcaac

SEQ ID NO: 34887 - DNA, 22 bp, Artificial Sequence
  chemically synthesized
cgctttgttcaactgccgcatt

SEQ ID NO: 34888 - DNA, 22 bp, Artificial Sequence
  chemically synthesized
gctttgttcaactgccgcattg

SEQ ID NO: 34889 - DNA, 22 bp, Artificial Sequence
  chemically synthesized
tgttcaactgccgcattgtttc

SEQ ID NO: 34890 - DNA, 22 bp, Artificial Sequence
  chemically synthesized
gttcaactgccgcattgtttct

SEQ ID NO: 34891 - DNA, 22 bp, Artificial Sequence
  chemically synthesized
ttcaactgccgcattgtttctc

SEQ ID NO: 34892 - DNA, 22 bp, Artificial Sequence
  chemically synthesized
aactgccgcattgtttctctct

SEQ ID NO: 34893 - DNA, 22 bp, Artificial Sequence
  chemically synthesized
ccgcattgtttctctctgcaag

SEQ ID NO: 34894 - DNA, 22 bp, Artificial Sequence
  chemically synthesized
tttctctctgcaagagaggaag

SEQ ID NO: 34895 - DNA, 22 bp, Artificial Sequence
  chemically synthesized
ctctctgcaagagaggaaggaa

SEQ ID NO: 34896 - DNA, 22 bp, Artificial Sequence
  chemically synthesized
tctctgcaagagaggaaggaag

SEQ ID NO: 34897 - DNA, 22 bp, Artificial Sequence
  chemically synthesized
tctgcaagagaggaaggaaggc

SEQ ID NO: 34898 - DNA, 22 bp, Artificial Sequence
  chemically synthesized
tgcaagagaggaaggaaggctg

SEQ ID NO: 34899 - DNA, 22 bp, Artificial Sequence
  chemically synthesized
caagagaggaaggaaggctgga

SEQ ID NO: 34900 - DNA, 22 bp, Artificial Sequence
  chemically synthesized
gagtacagctgagctttctggc

SEQ ID NO: 34901 - DNA, 22 bp, Artificial Sequence
  chemically synthesized
agctttctggcaggcactggtg

SEQ ID NO: 34902 - DNA, 22 bp, Artificial Sequence
  chemically synthesized
tctggcaggcactggtggagtt

SEQ ID NO: 34903 - DNA, 22 bp, Artificial Sequence
  chemically synthesized
ctggcaggcactggtggagtta

SEQ ID NO: 34904 - DNA, 22 bp, Artificial Sequence
  chemically synthesized
tggcaggcactggtggagttac

SEQ ID NO: 34905 - DNA, 22 bp, Artificial Sequence
  chemically synthesized
gcaggcactggtggagttactc

SEQ ID NO: 34906 - DNA, 22 bp, Artificial Sequence
  chemically synthesized
gtggagttactcattaaccttc

SEQ ID NO: 34907 - DNA, 22 bp, Artificial Sequence
  chemically synthesized
ctcattaaccttccccattctt

SEQ ID NO: 34908 - DNA, 22 bp, Artificial Sequence
  chemically synthesized
attaaccttccccattctttgt

SEQ ID NO: 34909 - DNA, 22 bp, Artificial Sequence
  chemically synthesized
accttccccattctttgtaact

SEQ ID NO: 34910 - DNA, 22 bp, Artificial Sequence
  chemically synthesized
ccccattctttgtaactggtgg

SEQ ID NO: 34911 - DNA, 22 bp, Artificial Sequence
  chemically synthesized
cccattctttgtaactggtggc

SEQ ID NO: 34912 - DNA, 22 bp, Artificial Sequence
  chemically synthesized
tttgtaactggtggccttagaa

SEQ ID NO: 34913 - DNA, 22 bp, Artificial Sequence
  chemically synthesized
tgtaactggtggccttagaaga

SEQ ID NO: 34914 - DNA, 22 bp, Artificial Sequence
  chemically synthesized
gtaactggtggccttagaagag

SEQ ID NO: 34915 - DNA, 22 bp, Artificial Sequence
  chemically synthesized
taactggtggccttagaagagg

SEQ ID NO: 34916 - DNA, 22 bp, Artificial Sequence
  chemically synthesized
gtggccttagaagagggttcag

SEQ ID NO: 34917 - DNA, 22 bp, Artificial Sequence
  chemically synthesized
agaagagggttcagggttatgt

SEQ ID NO: 34918 - DNA, 22 bp, Artificial Sequence
  chemically synthesized
gaagagggttcagggttatgtg

SEQ ID NO: 34919 - DNA, 22 bp, Artificial Sequence
  chemically synthesized
agggttatgtgtttggaacacg

SEQ ID NO: 34920 - DNA, 22 bp, Artificial Sequence
  chemically synthesized
tgtgtttggaacacgagttagt

SEQ ID NO: 34921 - DNA, 22 bp, Artificial Sequence
  chemically synthesized
ggaacacgagttagtataaatg

SEQ ID NO: 34922 - DNA, 22 bp, Artificial Sequence
  chemically synthesized
gaacacgagttagtataaatgg

SEQ ID NO: 34923 - DNA, 22 bp, Artificial Sequence
  chemically synthesized
gtataaatggttctgaagcact

SEQ ID NO: 34924 - DNA, 22 bp, Artificial Sequence
  chemically synthesized
tgaagcacttgattcagactgt

SEQ ID NO: 34925 - DNA, 22 bp, Artificial Sequence
  chemically synthesized
aagcacttgattcagactgtgc

SEQ ID NO: 34926 - DNA, 22 bp, Artificial Sequence
  chemically synthesized
gattcagactgtgctttaaaaa

SEQ ID NO: 34927 - DNA, 22 bp, Artificial Sequence
  chemically synthesized
attcagactgtgctttaaaaaa

SEQ ID NO: 34928 - DNA, 22 bp, Artificial Sequence
  chemically synthesized
agactgtgctttaaaaaatagg

SEQ ID NO: 34929 - DNA, 22 bp, Artificial Sequence
  chemically synthesized
tgctttaaaaaataggaaagaa

SEQ ID NO: 34930 - DNA, 22 bp, Artificial Sequence
  chemically synthesized
taaaaaataggaaagaaagtag

SEQ ID NO: 34931 - DNA, 22 bp, Artificial Sequence
  chemically synthesized
aaaaaataggaaagaaagtaga

SEQ ID NO: 34932 - DNA, 22 bp, Artificial Sequence
  chemically synthesized
aaaaataggaaagaaagtagaa

SEQ ID NO: 34933 - DNA, 22 bp, Artificial Sequence
  chemically synthesized
atggtttggaagggagccacca

SEQ ID NO: 34934 - DNA, 22 bp, Artificial Sequence
  chemically synthesized
ggaagggagccaccaagcacca

SEQ ID NO: 34935 - DNA, 22 bp, Artificial Sequence
  chemically synthesized
gaagggagccaccaagcaccaa

SEQ ID NO: 34936 - DNA, 22 bp, Artificial Sequence
  chemically synthesized
tgaatccgtttctcaatcttag

SEQ ID NO: 34937 - DNA, 22 bp, Artificial Sequence
  chemically synthesized
aatccgtttctcaatcttagct

SEQ ID NO: 34938 - DNA, 22 bp, Artificial Sequence
  chemically synthesized
ctcaatcttagctgcagggcat

SEQ ID NO: 34939 - DNA, 22 bp, Artificial Sequence
  chemically synthesized
tcaatcttagctgcagggcatt

SEQ ID NO: 34940 - DNA, 22 bp, Artificial Sequence
  chemically synthesized
aatcttagctgcagggcattgg

SEQ ID NO: 34941 - DNA, 22 bp, Artificial Sequence
  chemically synthesized
agctgcagggcattggctaaag

SEQ ID NO: 34942 - DNA, 22 bp, Artificial Sequence
  chemically synthesized
gctgcagggcattggctaaaga

SEQ ID NO: 34943 - DNA, 22 bp, Artificial Sequence
  chemically synthesized
cagggcattggctaaagaggaa

SEQ ID NO: 34944 - DNA, 22 bp, Artificial Sequence
  chemically synthesized
gctaaagaggaaggtgaaaact

SEQ ID NO: 34945 - DNA, 22 bp, Artificial Sequence
  chemically synthesized
aagaggaaggtgaaaactgctg

SEQ ID NO: 34946 - DNA, 22 bp, Artificial Sequence
  chemically synthesized
ctgagtcactatcaaatcaatt

SEQ ID NO: 34947 - DNA, 22 bp, Artificial Sequence
  chemically synthesized
agtcactatcaaatcaattggt

SEQ ID NO: 34948 - DNA, 22 bp, Artificial Sequence
  chemically synthesized
tcaaatcaattggtttttctaa

SEQ ID NO: 34949 - DNA, 22 bp, Artificial Sequence
  chemically synthesized
gtttttctaatcccctgagaga

SEQ ID NO: 34950 - DNA, 22 bp, Artificial Sequence
  chemically synthesized
ttctaatcccctgagagaaaaa

SEQ ID NO: 34951 - DNA, 22 bp, Artificial Sequence
  chemically synthesized
tctaatcccctgagagaaaaag

SEQ ID NO: 34952 - DNA, 22 bp, Artificial Sequence
  chemically synthesized
ctaatcccctgagagaaaaagt

SEQ ID NO: 34953 - DNA, 22 bp, Artificial Sequence
  chemically synthesized
taatcccctgagagaaaaagta

SEQ ID NO: 34954 - DNA, 22 bp, Artificial Sequence
  chemically synthesized
atcccctgagagaaaaagtaca

SEQ ID NO: 34955 - DNA, 22 bp, Artificial Sequence
  chemically synthesized
agagaaaaagtacagagtttat

SEQ ID NO: 34956 - DNA, 22 bp, Artificial Sequence
  chemically synthesized
attgcagctttaaaatgccatg

SEQ ID NO: 34957 - DNA, 22 bp, Artificial Sequence
  chemically synthesized
ttgcagctttaaaatgccatgc

SEQ ID NO: 34958 - DNA, 22 bp, Artificial Sequence
  chemically synthesized
cagctttaaaatgccatgcccc

SEQ ID NO: 34959 - DNA, 22 bp, Artificial Sequence
  chemically synthesized
taaaatgccatgcccctcacgg

SEQ ID NO: 34960 - DNA, 22 bp, Artificial Sequence
  chemically synthesized
aaaatgccatgcccctcacggc

SEQ ID NO: 34961 - DNA, 22 bp, Artificial Sequence
  chemically synthesized
aaatgccatgcccctcacggcc

SEQ ID NO: 34962 - DNA, 22 bp, Artificial Sequence
  chemically synthesized
acggccaaaggcatctgaatta

SEQ ID NO: 34963 - DNA, 22 bp, Artificial Sequence
  chemically synthesized
aattaaggaagcagtattcaca

SEQ ID NO: 34964 - DNA, 22 bp, Artificial Sequence
  chemically synthesized
aggaagcagtattcacagctgc

SEQ ID NO: 34965 - DNA, 22 bp, Artificial Sequence
  chemically synthesized
acagctgctttctccagacatt

SEQ ID NO: 34966 - DNA, 22 bp, Artificial Sequence
  chemically synthesized
ctttctccagacattgagctca

SEQ ID NO: 34967 - DNA, 22 bp, Artificial Sequence
  chemically synthesized
tctccagacattgagctcaagg

SEQ ID NO: 34968 - DNA, 22 bp, Artificial Sequence
  chemically synthesized
ctccagacattgagctcaagga

SEQ ID NO: 34969 - DNA, 22 bp, Artificial Sequence
  chemically synthesized
tccagacattgagctcaaggac

SEQ ID NO: 34970 - DNA, 22 bp, Artificial Sequence
  chemically synthesized
cagacattgagctcaaggacag

SEQ ID NO: 34971 - DNA, 22 bp, Artificial Sequence
  chemically synthesized
agctcaaggacagaatctgaac

SEQ ID NO: 34972 - DNA, 22 bp, Artificial Sequence
  chemically synthesized
aaggacagaatctgaactctgc

SEQ ID NO: 34973 - DNA, 22 bp, Artificial Sequence
  chemically synthesized
aactctgcttttatcagctgcg

SEQ ID NO: 34974 - DNA, 22 bp, Artificial Sequence
  chemically synthesized
tgcttttatcagctgcgaaaat

SEQ ID NO: 34975 - DNA, 22 bp, Artificial Sequence
  chemically synthesized
cttttatcagctgcgaaaatcc

SEQ ID NO: 34976 - DNA, 22 bp, Artificial Sequence
  chemically synthesized
ttatcagctgcgaaaatccaag

SEQ ID NO: 34977 - DNA, 22 bp, Artificial Sequence
  chemically synthesized
tatcagctgcgaaaatccaagc

SEQ ID NO: 34978 - DNA, 22 bp, Artificial Sequence
  chemically synthesized
atcagctgcgaaaatccaagca

SEQ ID NO: 34979 - DNA, 22 bp, Artificial Sequence
  chemically synthesized
tcagctgcgaaaatccaagcat

SEQ ID NO: 34980 - DNA, 22 bp, Artificial Sequence
  chemically synthesized
cgaaaatccaagcattcatttc

SEQ ID NO: 34981 - DNA, 22 bp, Artificial Sequence
  chemically synthesized
atttccagctggttcagtgcct

SEQ ID NO: 34982 - DNA, 22 bp, Artificial Sequence
  chemically synthesized
ccagctggttcagtgcctatgt

SEQ ID NO: 34983 - DNA, 22 bp, Artificial Sequence
  chemically synthesized
cagctggttcagtgcctatgta

SEQ ID NO: 34984 - DNA, 22 bp, Artificial Sequence
  chemically synthesized
gttcagtgcctatgtaaaagta

SEQ ID NO: 34985 - DNA, 22 bp, Artificial Sequence
  chemically synthesized
agtgcctatgtaaaagtatact

SEQ ID NO: 34986 - DNA, 22 bp, Artificial Sequence
  chemically synthesized
tgtaaaagtatactgtgtacaa

SEQ ID NO: 34987 - DNA, 22 bp, Artificial Sequence
  chemically synthesized
tgtacaaaaataagattaaaaa

SEQ ID NO: 34988 - DNA, 22 bp, Artificial Sequence
  chemically synthesized
aaaagctaacattaagcaagtg

SEQ ID NO: 34989 - DNA, 22 bp, Artificial Sequence
  chemically synthesized
acattaagcaagtgtgtttgta

SEQ ID NO: 34990 - DNA, 22 bp, Artificial Sequence
  chemically synthesized
agcaagtgtgtttgtatgtttt

SEQ ID NO: 34991 - DNA, 22 bp, Artificial Sequence
  chemically synthesized
gtatgttttctacagttcggat

SEQ ID NO: 34992 - DNA, 22 bp, Artificial Sequence
  chemically synthesized
tatgttttctacagttcggatt

SEQ ID NO: 34993 - DNA, 22 bp, Artificial Sequence
  chemically synthesized
tctacagttcggatttctgaat

SEQ ID NO: 34994 - DNA, 22 bp, Artificial Sequence
  chemically synthesized
ctacagttcggatttctgaata

SEQ ID NO: 34995 - DNA, 22 bp, Artificial Sequence
  chemically synthesized
tacagttcggatttctgaataa

SEQ ID NO: 34996 - DNA, 22 bp, Artificial Sequence
  chemically synthesized
cagttcggatttctgaataatt

SEQ ID NO: 34997 - DNA, 22 bp, Artificial Sequence
  chemically synthesized
ggatttctgaataatttgatcc

SEQ ID NO: 34998 - DNA, 22 bp, Artificial Sequence
  chemically synthesized
ctgaataatttgatccgacaga

SEQ ID NO: 34999 - DNA, 22 bp, Artificial Sequence
  chemically synthesized
tgaataatttgatccgacagaa

SEQ ID NO: 35000 - DNA, 22 bp, Artificial Sequence
  chemically synthesized
aataatttgatccgacagaaaa

SEQ ID NO: 35001 - DNA, 22 bp, Artificial Sequence
  chemically synthesized
gatccgacagaaaaatatgatt

SEQ ID NO: 35002 - DNA, 22 bp, Artificial Sequence
  chemically synthesized
atccgacagaaaaatatgattt

SEQ ID NO: 35003 - DNA, 22 bp, Artificial Sequence
  chemically synthesized
catttcttttcgagagaattat

SEQ ID NO: 35004 - DNA, 22 bp, Artificial Sequence
  chemically synthesized
atttcttttcgagagaattata

SEQ ID NO: 35005 - DNA, 22 bp, Artificial Sequence
  chemically synthesized
cttttcgagagaattatatgca

SEQ ID NO: 35006 - DNA, 22 bp, Artificial Sequence
  chemically synthesized
ttttcgagagaattatatgcat

SEQ ID NO: 35007 - DNA, 22 bp, Artificial Sequence
  chemically synthesized
ttcgagagaattatatgcatac

SEQ ID NO: 35008 - DNA, 22 bp, Artificial Sequence
  chemically synthesized
tcgagagaattatatgcatact

SEQ ID NO: 35009 - DNA, 22 bp, Artificial Sequence
  chemically synthesized
cgagagaattatatgcatactt

SEQ ID NO: 35010 - DNA, 22 bp, Artificial Sequence
  chemically synthesized
gagagaattatatgcatacttt

SEQ ID NO: 35011 - DNA, 22 bp, Artificial Sequence
  chemically synthesized
tatgcatactttctaaatgcaa

SEQ ID NO: 35012 - DNA, 22 bp, Artificial Sequence
  chemically synthesized
tctaaatgcaagaataaattcc

SEQ ID NO: 35013 - DNA, 22 bp, Artificial Sequence
  chemically synthesized
ctaaatgcaagaataaattcct

SEQ ID NO: 35014 - DNA, 22 bp, Artificial Sequence
  chemically synthesized
taaatgcaagaataaattcctg

SEQ ID NO: 35015 - DNA, 22 bp, Artificial Sequence
  chemically synthesized
aatgcaagaataaattcctgag

SEQ ID NO: 35016 - DNA, 22 bp, Artificial Sequence
  chemically synthesized
ctgagctccatgtgacttcagt

SEQ ID NO: 35017 - DNA, 22 bp, Artificial Sequence
  chemically synthesized
agctccatgtgacttcagtacc

SEQ ID NO: 35018 - DNA, 22 bp, Artificial Sequence
  chemically synthesized
catgtgacttcagtaccatcag

SEQ ID NO: 35019 - DNA, 22 bp, Artificial Sequence
  chemically synthesized
cagtaccatcagctctttggca

SEQ ID NO: 35020 - DNA, 22 bp, Artificial Sequence
  chemically synthesized
agtaccatcagctctttggcag

SEQ ID NO: 35021 - DNA, 22 bp, Artificial Sequence
  chemically synthesized
tttggcagcttatgagtataca

SEQ ID NO: 35022 - DNA, 22 bp, Artificial Sequence
  chemically synthesized
tggcagcttatgagtatacagc

SEQ ID NO: 35023 - DNA, 22 bp, Artificial Sequence
  chemically synthesized
ggcagcttatgagtatacagct

SEQ ID NO: 35024 - DNA, 22 bp, Artificial Sequence
  chemically synthesized
gcagcttatgagtatacagctt

SEQ ID NO: 35025 - DNA, 22 bp, Artificial Sequence
  chemically synthesized
atgagtatacagctttttaatt

SEQ ID NO: 35026 - DNA, 22 bp, Artificial Sequence
  chemically synthesized
tgagtatacagctttttaattc

SEQ ID NO: 35027 - DNA, 22 bp, Artificial Sequence
  chemically synthesized
tttaattctcacctggtcccca

SEQ ID NO: 35028 - DNA, 22 bp, Artificial Sequence
  chemically synthesized
ttaattctcacctggtccccag

SEQ ID NO: 35029 - DNA, 22 bp, Artificial Sequence
  chemically synthesized
taattctcacctggtccccagg

SEQ ID NO: 35030 - DNA, 22 bp, Artificial Sequence
  chemically synthesized
aattctcacctggtccccagga

SEQ ID NO: 35031 - DNA, 22 bp, Artificial Sequence
  chemically synthesized
attctcacctggtccccaggat

SEQ ID NO: 35032 - DNA, 22 bp, Artificial Sequence
  chemically synthesized
tcacctggtccccaggatatgg

SEQ ID NO: 35033 - DNA, 22 bp, Artificial Sequence
  chemically synthesized
acctggtccccaggatatggtt

SEQ ID NO: 35034 - DNA, 22 bp, Artificial Sequence
  chemically synthesized
gtccccaggatatggtttactt

SEQ ID NO: 35035 - DNA, 22 bp, Artificial Sequence
  chemically synthesized
acttgtcagagtagttttatga

SEQ ID NO: 35036 - DNA, 22 bp, Artificial Sequence
  chemically synthesized
cttgtcagagtagttttatgag

SEQ ID NO: 35037 - DNA, 22 bp, Artificial Sequence
  chemically synthesized
gtcagagtagttttatgaggtg

SEQ ID NO: 35038 - DNA, 22 bp, Artificial Sequence
  chemically synthesized
tcagagtagttttatgaggtgc

SEQ ID NO: 35039 - DNA, 22 bp, Artificial Sequence
  chemically synthesized
tatgaggtgctttctcctgact

SEQ ID NO: 35040 - DNA, 22 bp, Artificial Sequence
  chemically synthesized
atgaggtgctttctcctgactc

SEQ ID NO: 35041 - DNA, 22 bp, Artificial Sequence
  chemically synthesized
tgaggtgctttctcctgactct

SEQ ID NO: 35042 - DNA, 22 bp, Artificial Sequence
  chemically synthesized
tctcctgactctgattctaggt

SEQ ID NO: 35043 - DNA, 22 bp, Artificial Sequence
  chemically synthesized
ctcctgactctgattctaggta

SEQ ID NO: 35044 - DNA, 22 bp, Artificial Sequence
  chemically synthesized
tcctgactctgattctaggtaa

SEQ ID NO: 35045 - DNA, 22 bp, Artificial Sequence
  chemically synthesized
ctgactctgattctaggtaaca

SEQ ID NO: 35046 - DNA, 22 bp, Artificial Sequence
  chemically synthesized
actctgattctaggtaacacct

SEQ ID NO: 35047 - DNA, 22 bp, Artificial Sequence
  chemically synthesized
tgattctaggtaacacctgatg

SEQ ID NO: 35048 - DNA, 22 bp, Artificial Sequence
  chemically synthesized
attctaggtaacacctgatgag

SEQ ID NO: 35049 - DNA, 22 bp, Artificial Sequence
  chemically synthesized
taggtaacacctgatgagatga

SEQ ID NO: 35050 - DNA, 22 bp, Artificial Sequence
  chemically synthesized
ggtaacacctgatgagatgaac

SEQ ID NO: 35051 - DNA, 22 bp, Artificial Sequence
  chemically synthesized
atgagatgaacagatggtgcac

SEQ ID NO: 35052 - DNA, 22 bp, Artificial Sequence
  chemically synthesized
acttcctcttactgggcatgaa

SEQ ID NO: 35053 - DNA, 22 bp, Artificial Sequence
  chemically synthesized
cctcttactgggcatgaaggaa

SEQ ID NO: 35054 - DNA, 22 bp, Artificial Sequence
  chemically synthesized
ctcttactgggcatgaaggaaa

SEQ ID NO: 35055 - DNA, 22 bp, Artificial Sequence
  chemically synthesized
ttactgggcatgaaggaaagag

SEQ ID NO: 35056 - DNA, 22 bp, Artificial Sequence
  chemically synthesized
actgggcatgaaggaaagagag

SEQ ID NO: 35057 - DNA, 22 bp, Artificial Sequence
  chemically synthesized
ctgggcatgaaggaaagagaga

SEQ ID NO: 35058 - DNA, 22 bp, Artificial Sequence
  chemically synthesized
ggcatgaaggaaagagagagaa

SEQ ID NO: 35059 - DNA, 22 bp, Artificial Sequence
  chemically synthesized
ctgctacattttttttttctgt

SEQ ID NO: 35060 - DNA, 22 bp, Artificial Sequence
  chemically synthesized
ctacattttttttttctgtgga

SEQ ID NO: 35061 - DNA, 22 bp, Artificial Sequence
  chemically synthesized
cattttttttttctgtggaaaa

SEQ ID NO: 35062 - DNA, 22 bp, Artificial Sequence
  chemically synthesized
tttttttctgtggaaaaagagt

SEQ ID NO: 35063 - DNA, 22 bp, Artificial Sequence
  chemically synthesized
ttttttctgtggaaaaagagtc

SEQ ID NO: 35064 - DNA, 22 bp, Artificial Sequence
  chemically synthesized
tttttctgtggaaaaagagtct

SEQ ID NO: 35065 - DNA, 22 bp, Artificial Sequence
  chemically synthesized
ttttctgtggaaaaagagtcta

SEQ ID NO: 35066 - DNA, 22 bp, Artificial Sequence
  chemically synthesized
tttctgtggaaaaagagtctaa

SEQ ID NO: 35067 - DNA, 22 bp, Artificial Sequence
  chemically synthesized
ttctgtggaaaaagagtctaat

SEQ ID NO: 35068 - DNA, 22 bp, Artificial Sequence
  chemically synthesized
tctgtggaaaaagagtctaata

SEQ ID NO: 35069 - DNA, 22 bp, Artificial Sequence
  chemically synthesized
ctgtggaaaaagagtctaatat

SEQ ID NO: 35070 - DNA, 22 bp, Artificial Sequence
  chemically synthesized
tgtggaaaaagagtctaatatt

SEQ ID NO: 35071 - DNA, 22 bp, Artificial Sequence
  chemically synthesized
tggaaaaagagtctaatatttc

SEQ ID NO: 35072 - DNA, 22 bp, Artificial Sequence
  chemically synthesized
atatttctaattaaccttgatg

SEQ ID NO: 35073 - DNA, 22 bp, Artificial Sequence
  chemically synthesized
ctaattaaccttgatgggaaca

SEQ ID NO: 35074 - DNA, 22 bp, Artificial Sequence
  chemically synthesized
taattaaccttgatgggaacat

SEQ ID NO: 35075 - DNA, 22 bp, Artificial Sequence
  chemically synthesized
attaaccttgatgggaacatag

SEQ ID NO: 35076 - DNA, 22 bp, Artificial Sequence
  chemically synthesized
accttgatgggaacatagaaca

SEQ ID NO: 35077 - DNA, 22 bp, Artificial Sequence
  chemically synthesized
gatgggaacatagaacatagat

SEQ ID NO: 35078 - DNA, 22 bp, Artificial Sequence
  chemically synthesized
atgggaacatagaacatagatt

SEQ ID NO: 35079 - DNA, 22 bp, Artificial Sequence
  chemically synthesized
taaagggaacttgcacattatc

SEQ ID NO: 35080 - DNA, 22 bp, Artificial Sequence
  chemically synthesized
gcacattatcgcagtaggctga

SEQ ID NO: 35081 - DNA, 22 bp, Artificial Sequence
  chemically synthesized
cacattatcgcagtaggctgaa

SEQ ID NO: 35082 - DNA, 22 bp, Artificial Sequence
  chemically synthesized
tcgcagtaggctgaataatggc

SEQ ID NO: 35083 - DNA, 22 bp, Artificial Sequence
  chemically synthesized
aataatggctaatggctcactc

SEQ ID NO: 35084 - DNA, 22 bp, Artificial Sequence
  chemically synthesized
atggctcactctgaaagatatg

SEQ ID NO: 35085 - DNA, 22 bp, Artificial Sequence
  chemically synthesized
actctgaaagatatgtatggct

SEQ ID NO: 35086 - DNA, 22 bp, Artificial Sequence
  chemically synthesized
tgaaagatatgtatggcttaac

SEQ ID NO: 35087 - DNA, 22 bp, Artificial Sequence
  chemically synthesized
aaagatatgtatggcttaaccc

SEQ ID NO: 35088 - DNA, 22 bp, Artificial Sequence
  chemically synthesized
aacccctgaaacctgtgagtat

SEQ ID NO: 35089 - DNA, 22 bp, Artificial Sequence
  chemically synthesized
acccctgaaacctgtgagtatt

SEQ ID NO: 35090 - DNA, 22 bp, Artificial Sequence
  chemically synthesized
aaacctgtgagtattatctttt

SEQ ID NO: 35091 - DNA, 22 bp, Artificial Sequence
  chemically synthesized
tgagtattatcttttctagcca

SEQ ID NO: 35092 - DNA, 22 bp, Artificial Sequence
  chemically synthesized
tcttttctagccaaacagactt

SEQ ID NO: 35093 - DNA, 22 bp, Artificial Sequence
  chemically synthesized
ttctagccaaacagacttttgc

SEQ ID NO: 35094 - DNA, 22 bp, Artificial Sequence
  chemically synthesized
tctagccaaacagacttttgca

SEQ ID NO: 35095 - DNA, 22 bp, Artificial Sequence
  chemically synthesized
ctagccaaacagacttttgcat

SEQ ID NO: 35096 - DNA, 22 bp, Artificial Sequence
  chemically synthesized
tagccaaacagacttttgcata

SEQ ID NO: 35097 - DNA, 22 bp, Artificial Sequence
  chemically synthesized
gccaaacagacttttgcatata

SEQ ID NO: 35098 - DNA, 22 bp, Artificial Sequence
  chemically synthesized
ttgcatatataattaaggatct

SEQ ID NO: 35099 - DNA, 22 bp, Artificial Sequence
  chemically synthesized
tgcatatataattaaggatctt

SEQ ID NO: 35100 - DNA, 22 bp, Artificial Sequence
  chemically synthesized
gcatatataattaaggatcttg

SEQ ID NO: 35101 - DNA, 22 bp, Artificial Sequence
  chemically synthesized
catatataattaaggatcttgg

SEQ ID NO: 35102 - DNA, 22 bp, Artificial Sequence
  chemically synthesized
aggatcttgggatggggagata

SEQ ID NO: 35103 - DNA, 22 bp, Artificial Sequence
  chemically synthesized
gggatggggagatatcctaatt

SEQ ID NO: 35104 - DNA, 22 bp, Artificial Sequence
  chemically synthesized
ggatggggagatatcctaatta

SEQ ID NO: 35105 - DNA, 22 bp, Artificial Sequence
  chemically synthesized
attatttgggtgtatcctaaat

SEQ ID NO: 35106 - DNA, 22 bp, Artificial Sequence
  chemically synthesized
tttgggtgtatcctaaatgtaa

SEQ ID NO: 35107 - DNA, 22 bp, Artificial Sequence
  chemically synthesized
gggtgtatcctaaatgtaatca

SEQ ID NO: 35108 - DNA, 22 bp, Artificial Sequence
  chemically synthesized
ggtgtatcctaaatgtaatcac

SEQ ID NO: 35109 - DNA, 22 bp, Artificial Sequence
  chemically synthesized
aatgtaatcacaagtgtcatta

SEQ ID NO: 35110 - DNA, 22 bp, Artificial Sequence
  chemically synthesized
taagagggaggcaaagggagat

SEQ ID NO: 35111 - DNA, 22 bp, Artificial Sequence
  chemically synthesized
gacttataagaggagaaaatgt

SEQ ID NO: 35112 - DNA, 22 bp, Artificial Sequence
  chemically synthesized
acttataagaggagaaaatgtg

SEQ ID NO: 35113 - DNA, 22 bp, Artificial Sequence
  chemically synthesized
ataagaggagaaaatgtgacgt

SEQ ID NO: 35114 - DNA, 22 bp, Artificial Sequence
  chemically synthesized
taagaggagaaaatgtgacgtg

SEQ ID NO: 35115 - DNA, 22 bp, Artificial Sequence
  chemically synthesized
caaaagcagagatacatttttt

SEQ ID NO: 35116 - DNA, 22 bp, Artificial Sequence
  chemically synthesized
ttttgaagatcgaggaagaggc

SEQ ID NO: 35117 - DNA, 22 bp, Artificial Sequence
  chemically synthesized
tttgaagatcgaggaagaggct

SEQ ID NO: 35118 - DNA, 22 bp, Artificial Sequence
  chemically synthesized
ttgaagatcgaggaagaggcta

SEQ ID NO: 35119 - DNA, 22 bp, Artificial Sequence
  chemically synthesized
tgaagatcgaggaagaggctac

SEQ ID NO: 35120 - DNA, 22 bp, Artificial Sequence
  chemically synthesized
gaagatcgaggaagaggctaca

SEQ ID NO: 35121 - DNA, 22 bp, Artificial Sequence
  chemically synthesized
aagatcgaggaagaggctacaa

SEQ ID NO: 35122 - DNA, 22 bp, Artificial Sequence
  chemically synthesized
caaaccaaggaatgtgggtagc

SEQ ID NO: 35123 - DNA, 22 bp, Artificial Sequence
  chemically synthesized
tagaagaggaaacagaatccat

SEQ ID NO: 35124 - DNA, 22 bp, Artificial Sequence
  chemically synthesized
gaagaggaaacagaatccatgg

SEQ ID NO: 35125 - DNA, 22 bp, Artificial Sequence
  chemically synthesized
tcatagagtctccagaagaaac

SEQ ID NO: 35126 - DNA, 22 bp, Artificial Sequence
  chemically synthesized
atagagtctccagaagaaacag

SEQ ID NO: 35127 - DNA, 22 bp, Artificial Sequence
  chemically synthesized
cagaagaaacagccacactgac

SEQ ID NO: 35128 - DNA, 22 bp, Artificial Sequence
  chemically synthesized
acacctcgactttagcccagtg

SEQ ID NO: 35129 - DNA, 22 bp, Artificial Sequence
  chemically synthesized
gactttagcccagtgaaaccga

SEQ ID NO: 35130 - DNA, 22 bp, Artificial Sequence
  chemically synthesized
tagcccagtgaaaccgatttca

SEQ ID NO: 35131 - DNA, 22 bp, Artificial Sequence
  chemically synthesized
agcccagtgaaaccgatttcag

SEQ ID NO: 35132 - DNA, 22 bp, Artificial Sequence
  chemically synthesized
gcccagtgaaaccgatttcaga

SEQ ID NO: 35133 - DNA, 22 bp, Artificial Sequence
  chemically synthesized
cagacttctgacctccacaact

SEQ ID NO: 35134 - DNA, 22 bp, Artificial Sequence
  chemically synthesized
agacttctgacctccacaactt

SEQ ID NO: 35135 - DNA, 22 bp, Artificial Sequence
  chemically synthesized
ctgacctccacaacttcaagat

SEQ ID NO: 35136 - DNA, 22 bp, Artificial Sequence
  chemically synthesized
tgacctccacaacttcaagata

SEQ ID NO: 35137 - DNA, 22 bp, Artificial Sequence
  chemically synthesized
acctccacaacttcaagataat

SEQ ID NO: 35138 - DNA, 22 bp, Artificial Sequence
  chemically synthesized
cacaacttcaagataatacatt

SEQ ID NO: 35139 - DNA, 22 bp, Artificial Sequence
  chemically synthesized
caagataatacatttgtgttgt

SEQ ID NO: 35140 - DNA, 22 bp, Artificial Sequence
  chemically synthesized
aagataatacatttgtgttgtt

SEQ ID NO: 35141 - DNA, 22 bp, Artificial Sequence
  chemically synthesized
gtgttgttttaagccaataaat

SEQ ID NO: 35142 - DNA, 22 bp, Artificial Sequence
  chemically synthesized
tgttgttttaagccaataaatt

SEQ ID NO: 35143 - DNA, 22 bp, Artificial Sequence
  chemically synthesized
ttttaagccaataaatttgtgg

SEQ ID NO: 35144 - DNA, 22 bp, Artificial Sequence
  chemically synthesized
taagccaataaatttgtggtaa

SEQ ID NO: 35145 - DNA, 22 bp, Artificial Sequence
  chemically synthesized
aagccaataaatttgtggtaat

SEQ ID NO: 35146 - DNA, 22 bp, Artificial Sequence
  chemically synthesized
agccaataaatttgtggtaatt

SEQ ID NO: 35147 - DNA, 22 bp, Artificial Sequence
  chemically synthesized
gtggtaattttttacagcagca

SEQ ID NO: 35148 - DNA, 22 bp, Artificial Sequence
  chemically synthesized
tggtaattttttacagcagcaa

SEQ ID NO: 35149 - DNA, 22 bp, Artificial Sequence
  chemically synthesized
tttacagcagcaagaggaaatc

SEQ ID NO: 35150 - DNA, 22 bp, Artificial Sequence
  chemically synthesized
ttacagcagcaagaggaaatca

SEQ ID NO: 35151 - DNA, 22 bp, Artificial Sequence
  chemically synthesized
tacagcagcaagaggaaatcag

SEQ ID NO: 35152 - DNA, 22 bp, Artificial Sequence
  chemically synthesized
acagcagcaagaggaaatcagt

SEQ ID NO: 35153 - DNA, 22 bp, Artificial Sequence
  chemically synthesized
cagcagcaagaggaaatcagtt

SEQ ID NO: 35154 - DNA, 22 bp, Artificial Sequence
  chemically synthesized
cgtagaatagtaggtcctgtct

SEQ ID NO: 35155 - DNA, 22 bp, Artificial Sequence
  chemically synthesized
tctctggctaatcattagaatc

SEQ ID NO: 35156 - DNA, 22 bp, Artificial Sequence
  chemically synthesized
tggctaatcattagaatcactc

SEQ ID NO: 35157 - DNA, 22 bp, Artificial Sequence
  chemically synthesized
gctaatcattagaatcactcca

SEQ ID NO: 35158 - DNA, 22 bp, Artificial Sequence
  chemically synthesized
atcattagaatcactccagaag

SEQ ID NO: 35159 - DNA, 22 bp, Artificial Sequence
  chemically synthesized
gaatcactccagaagcttgtta

SEQ ID NO: 35160 - DNA, 22 bp, Artificial Sequence
  chemically synthesized
cagaagcttgttacatacagac

SEQ ID NO: 35161 - DNA, 22 bp, Artificial Sequence
  chemically synthesized
gttacatacagacccagagcca

SEQ ID NO: 35162 - DNA, 22 bp, Artificial Sequence
  chemically synthesized
ttacatacagacccagagccag

SEQ ID NO: 35163 - DNA, 22 bp, Artificial Sequence
  chemically synthesized
catacagacccagagccagtga

SEQ ID NO: 35164 - DNA, 22 bp, Artificial Sequence
  chemically synthesized
ggtggtggggcccagagcctga

SEQ ID NO: 35165 - DNA, 22 bp, Artificial Sequence
  chemically synthesized
gtggtggggcccagagcctgaa

SEQ ID NO: 35166 - DNA, 22 bp, Artificial Sequence
  chemically synthesized
aatattaagcaagttcttcgtt

SEQ ID NO: 35167 - DNA, 22 bp, Artificial Sequence
  chemically synthesized
agcaagttcttcgttttagaaa

SEQ ID NO: 35168 - DNA, 22 bp, Artificial Sequence
  chemically synthesized
ttcgttttagaaatgaggaaac

SEQ ID NO: 35169 - DNA, 22 bp, Artificial Sequence
  chemically synthesized
cgttttagaaatgaggaaacca

SEQ ID NO: 35170 - DNA, 22 bp, Artificial Sequence
  chemically synthesized
gttttagaaatgaggaaaccaa

SEQ ID NO: 35171 - DNA, 22 bp, Artificial Sequence
  chemically synthesized
tagaaatgaggaaaccaaggtt

SEQ ID NO: 35172 - DNA, 22 bp, Artificial Sequence
  chemically synthesized
agaaatgaggaaaccaaggttg

SEQ ID NO: 35173 - DNA, 22 bp, Artificial Sequence
  chemically synthesized
gaaatgaggaaaccaaggttgg

SEQ ID NO: 35174 - DNA, 22 bp, Artificial Sequence
  chemically synthesized
ggagaagctaagcaacttactc

SEQ ID NO: 35175 - DNA, 22 bp, Artificial Sequence
  chemically synthesized
agcaacttactcaaatacatag

SEQ ID NO: 35176 - DNA, 22 bp, Artificial Sequence
  chemically synthesized
actcaaatacatagggtatttc

SEQ ID NO: 35177 - DNA, 22 bp, Artificial Sequence
  chemically synthesized
ctcaaatacatagggtatttca

SEQ ID NO: 35178 - DNA, 22 bp, Artificial Sequence
  chemically synthesized
aaatacatagggtatttcattt

SEQ ID NO: 35179 - DNA, 22 bp, Artificial Sequence
  chemically synthesized
cattttaaatttaattttatta

SEQ ID NO: 35180 - DNA, 22 bp, Artificial Sequence
  chemically synthesized
attttaaatttaattttattac

SEQ ID NO: 35181 - DNA, 22 bp, Artificial Sequence
  chemically synthesized
taaatttaattttattacttta

SEQ ID NO: 35182 - DNA, 22 bp, Artificial Sequence
  chemically synthesized
aaatttaattttattactttat

SEQ ID NO: 35183 - DNA, 22 bp, Artificial Sequence
  chemically synthesized
aatttaattttattactttatc

SEQ ID NO: 35184 - DNA, 22 bp, Artificial Sequence
  chemically synthesized
aattttattactttatcttttg

SEQ ID NO: 35185 - DNA, 22 bp, Artificial Sequence
  chemically synthesized
attttattactttatcttttga

SEQ ID NO: 35186 - DNA, 22 bp, Artificial Sequence
  chemically synthesized
tattactttatcttttgaattt

SEQ ID NO: 35187 - DNA, 22 bp, Artificial Sequence
  chemically synthesized
attactttatcttttgaatttt

SEQ ID NO: 35188 - DNA, 22 bp, Artificial Sequence
  chemically synthesized
ttactttatcttttgaattttc

SEQ ID NO: 35189 - DNA, 22 bp, Artificial Sequence
  chemically synthesized
ctttatcttttgaattttctta

SEQ ID NO: 35190 - DNA, 22 bp, Artificial Sequence
  chemically synthesized
tatcttttgaattttcttaccc

SEQ ID NO: 35191 - DNA, 22 bp, Artificial Sequence
  chemically synthesized
atcttttgaattttcttacccc

SEQ ID NO: 35192 - DNA, 22 bp, Artificial Sequence
  chemically synthesized
tcttttgaattttcttacccca

SEQ ID NO: 35193 - DNA, 22 bp, Artificial Sequence
  chemically synthesized
ttgaattttcttaccccagttg

SEQ ID NO: 35194 - DNA, 22 bp, Artificial Sequence
  chemically synthesized
tgaattttcttaccccagttgt

SEQ ID NO: 35195 - DNA, 22 bp, Artificial Sequence
  chemically synthesized
gaattttcttaccccagttgta

SEQ ID NO: 35196 - DNA, 22 bp, Artificial Sequence
  chemically synthesized
aattttcttaccccagttgtac

SEQ ID NO: 35197 - DNA, 22 bp, Artificial Sequence
  chemically synthesized
tcttaccccagttgtacttttg

SEQ ID NO: 35198 - DNA, 22 bp, Artificial Sequence
  chemically synthesized
cttaccccagttgtacttttgt

SEQ ID NO: 35199 - DNA, 22 bp, Artificial Sequence
  chemically synthesized
ttaccccagttgtacttttgtg

SEQ ID NO: 35200 - DNA, 22 bp, Artificial Sequence
  chemically synthesized
accccagttgtacttttgtgta

SEQ ID NO: 35201 - DNA, 22 bp, Artificial Sequence
  chemically synthesized
ccccagttgtacttttgtgtaa

SEQ ID NO: 35202 - DNA, 22 bp, Artificial Sequence
  chemically synthesized
tacttttgtgtaaatgtgattt

SEQ ID NO: 35203 - DNA, 22 bp, Artificial Sequence
  chemically synthesized
ttgtgtaaatgtgatttcattt

SEQ ID NO: 35204 - DNA, 22 bp, Artificial Sequence
  chemically synthesized
tgtgtaaatgtgatttcattta

SEQ ID NO: 35205 - DNA, 22 bp, Artificial Sequence
  chemically synthesized
gtgtaaatgtgatttcatttac

SEQ ID NO: 35206 - DNA, 22 bp, Artificial Sequence
  chemically synthesized
tgtaaatgtgatttcatttacg

SEQ ID NO: 35207 - DNA, 22 bp, Artificial Sequence
  chemically synthesized
catttacggctttgtgttgaca

SEQ ID NO: 35208 - DNA, 22 bp, Artificial Sequence
  chemically synthesized
atttacggctttgtgttgacat

SEQ ID NO: 35209 - DNA, 22 bp, Artificial Sequence
  chemically synthesized
acggctttgtgttgacatattc

SEQ ID NO: 35210 - DNA, 22 bp, Artificial Sequence
  chemically synthesized
cggctttgtgttgacatattca

SEQ ID NO: 35211 - DNA, 22 bp, Artificial Sequence
  chemically synthesized
tgtgttgacatattcattaaaa

SEQ ID NO: 35212 - DNA, 22 bp, Artificial Sequence
  chemically synthesized
gtgttgacatattcattaaaat

SEQ ID NO: 35213 - DNA, 22 bp, Artificial Sequence
  chemically synthesized
tgttgacatattcattaaaatg

SEQ ID NO: 35214 - DNA, 22 bp, Artificial Sequence
  chemically synthesized
acatattcattaaaatgaagaa

SEQ ID NO: 35215 - DNA, 22 bp, Artificial Sequence
  chemically synthesized
attaaaatgaagaaataaaaga

SEQ ID NO: 35216 - DNA, 22 bp, Artificial Sequence
  chemically synthesized
aaatgaagaaataaaagatgag

SEQ ID NO: 35217 - DNA, 22 bp, Artificial Sequence
  chemically synthesized
taaaaattatataatgtttatt

SEQ ID NO: 35218 - DNA, 22 bp, Artificial Sequence
  chemically synthesized
aaaaattatataatgtttattg

SEQ ID NO: 35219 - DNA, 22 bp, Artificial Sequence
  chemically synthesized
aaaattatataatgtttattga

SEQ ID NO: 35220 - DNA, 22 bp, Artificial Sequence
  chemically synthesized
tataatgtttattgattagaat

SEQ ID NO: 35221 - DNA, 22 bp, Artificial Sequence
  chemically synthesized
attgattagaatgaatatgatg

SEQ ID NO: 35222 - DNA, 22 bp, Artificial Sequence
  chemically synthesized
ttgattagaatgaatatgatgc

SEQ ID NO: 35223 - DNA, 22 bp, Artificial Sequence
  chemically synthesized
attagaatgaatatgatgcaat

SEQ ID NO: 35224 - DNA, 22 bp, Artificial Sequence
  chemically synthesized
gaatgaatatgatgcaatctgg

SEQ ID NO: 35225 - DNA, 22 bp, Artificial Sequence
  chemically synthesized
gttttctgtgttcagattcctg

SEQ ID NO: 35226 - DNA, 22 bp, Artificial Sequence
  chemically synthesized
tctgtgttcagattcctgacct

SEQ ID NO: 35227 - DNA, 22 bp, Artificial Sequence
  chemically synthesized
ctgtgttcagattcctgacctc

SEQ ID NO: 35228 - DNA, 22 bp, Artificial Sequence
  chemically synthesized
tgtgttcagattcctgacctct

SEQ ID NO: 35229 - DNA, 22 bp, Artificial Sequence
  chemically synthesized
tgttcagattcctgacctctgg

SEQ ID NO: 35230 - DNA, 22 bp, Artificial Sequence
  chemically synthesized
agattcctgacctctggagtta

SEQ ID NO: 35231 - DNA, 22 bp, Artificial Sequence
  chemically synthesized
ctgacctctggagttaaccttt

SEQ ID NO: 35232 - DNA, 22 bp, Artificial Sequence
  chemically synthesized
acctctggagttaacctttctt

SEQ ID NO: 35233 - DNA, 22 bp, Artificial Sequence
  chemically synthesized
tggagttaacctttctttgtaa

SEQ ID NO: 35234 - DNA, 22 bp, Artificial Sequence
  chemically synthesized
gagttaacctttctttgtaaag

SEQ ID NO: 35235 - DNA, 22 bp, Artificial Sequence
  chemically synthesized
acctttctttgtaaagattaga

SEQ ID NO: 35236 - DNA, 22 bp, Artificial Sequence
  chemically synthesized
tctttgtaaagattagacagca

SEQ ID NO: 35237 - DNA, 22 bp, Artificial Sequence
  chemically synthesized
ctttgtaaagattagacagcag

SEQ ID NO: 35238 - DNA, 22 bp, Artificial Sequence
  chemically synthesized
tttgtaaagattagacagcagg

SEQ ID NO: 35239 - DNA, 22 bp, Artificial Sequence
  chemically synthesized
tgtaaagattagacagcaggca

SEQ ID NO: 35240 - DNA, 22 bp, Artificial Sequence
  chemically synthesized
gtaaagattagacagcaggcag

SEQ ID NO: 35241 - DNA, 22 bp, Artificial Sequence
  chemically synthesized
taaagattagacagcaggcagg

SEQ ID NO: 35242 - DNA, 22 bp, Artificial Sequence
  chemically synthesized
gacagcaggcagggaagaatgc

SEQ ID NO: 35243 - DNA, 22 bp, Artificial Sequence
  chemically synthesized
tgaaactgagagcaaagactgg

SEQ ID NO: 35244 - DNA, 22 bp, Artificial Sequence
  chemically synthesized
gaaactgagagcaaagactggc

SEQ ID NO: 35245 - DNA, 22 bp, Artificial Sequence
  chemically synthesized
aaactgagagcaaagactggca

SEQ ID NO: 35246 - DNA, 22 bp, Artificial Sequence
  chemically synthesized
agagcaaagactggcatgcaat

SEQ ID NO: 35247 - DNA, 22 bp, Artificial Sequence
  chemically synthesized
gcatgcaatttacattgatgtc

SEQ ID NO: 35248 - DNA, 22 bp, Artificial Sequence
  chemically synthesized
acattgatgtcctggtgctgtg

SEQ ID NO: 35249 - DNA, 22 bp, Artificial Sequence
  chemically synthesized
cattgatgtcctggtgctgtgc

SEQ ID NO: 35250 - DNA, 22 bp, Artificial Sequence
  chemically synthesized
atgtcctggtgctgtgcataat

SEQ ID NO: 35251 - DNA, 22 bp, Artificial Sequence
  chemically synthesized
gtgctgtgcataataagttgct

SEQ ID NO: 35252 - DNA, 22 bp, Artificial Sequence
  chemically synthesized
tgcataataagttgcttaaaca

SEQ ID NO: 35253 - DNA, 22 bp, Artificial Sequence
  chemically synthesized
cttaaacatgacagcaggatag

SEQ ID NO: 35254 - DNA, 22 bp, Artificial Sequence
  chemically synthesized
aaacatgacagcaggataggat

SEQ ID NO: 35255 - DNA, 22 bp, Artificial Sequence
  chemically synthesized
aacatgacagcaggataggatt

SEQ ID NO: 35256 - DNA, 22 bp, Artificial Sequence
  chemically synthesized
tacataaaatttatttataaat

SEQ ID NO: 35257 - DNA, 22 bp, Artificial Sequence
  chemically synthesized
acataaaatttatttataaatg

SEQ ID NO: 35258 - DNA, 22 bp, Artificial Sequence
  chemically synthesized
cataaaatttatttataaatgg

SEQ ID NO: 35259 - DNA, 22 bp, Artificial Sequence
  chemically synthesized
atttataaatggtaaagatgtt

SEQ ID NO: 35260 - DNA, 22 bp, Artificial Sequence
  chemically synthesized
tttataaatggtaaagatgttt

SEQ ID NO: 35261 - DNA, 22 bp, Artificial Sequence
  chemically synthesized
ataaatggtaaagatgtttcca

SEQ ID NO: 35262 - DNA, 22 bp, Artificial Sequence
  chemically synthesized
taaatggtaaagatgtttccaa

SEQ ID NO: 35263 - DNA, 22 bp, Artificial Sequence
  chemically synthesized
ccaacctctgctgaacttcctc

SEQ ID NO: 35264 - DNA, 22 bp, Artificial Sequence
  chemically synthesized
caacctctgctgaacttcctca

SEQ ID NO: 35265 - DNA, 22 bp, Artificial Sequence
  chemically synthesized
tgctgaacttcctcatagaatg

SEQ ID NO: 35266 - DNA, 22 bp, Artificial Sequence
  chemically synthesized
ctgaacttcctcatagaatgtt

SEQ ID NO: 35267 - DNA, 22 bp, Artificial Sequence
  chemically synthesized
aacttcctcatagaatgttcat

SEQ ID NO: 35268 - DNA, 22 bp, Artificial Sequence
  chemically synthesized
cctcatagaatgttcatcagaa

SEQ ID NO: 35269 - DNA, 22 bp, Artificial Sequence
  chemically synthesized
ctcatagaatgttcatcagaaa

SEQ ID NO: 35270 - DNA, 22 bp, Artificial Sequence
  chemically synthesized
atagaatgttcatcagaaaaca

SEQ ID NO: 35271 - DNA, 22 bp, Artificial Sequence
  chemically synthesized
atcagaaaacaaagtttctatc

SEQ ID NO: 35272 - DNA, 22 bp, Artificial Sequence
  chemically synthesized
ctatctactctttcttccaaga

SEQ ID NO: 35273 - DNA, 22 bp, Artificial Sequence
  chemically synthesized
tatctactctttcttccaagac

SEQ ID NO: 35274 - DNA, 22 bp, Artificial Sequence
  chemically synthesized
tctactctttcttccaagactt

SEQ ID NO: 35275 - DNA, 22 bp, Artificial Sequence
  chemically synthesized
ctctttcttccaagacttcaac

SEQ ID NO: 35276 - DNA, 22 bp, Artificial Sequence
  chemically synthesized
tttcttccaagacttcaactcc

SEQ ID NO: 35277 - DNA, 22 bp, Artificial Sequence
  chemically synthesized
tcttccaagacttcaactccta

SEQ ID NO: 35278 - DNA, 22 bp, Artificial Sequence
  chemically synthesized
cttccaagacttcaactcctac

SEQ ID NO: 35279 - DNA, 22 bp, Artificial Sequence
  chemically synthesized
ttccaagacttcaactcctacc

SEQ ID NO: 35280 - DNA, 22 bp, Artificial Sequence
  chemically synthesized
ccaagacttcaactcctaccac

SEQ ID NO: 35281 - DNA, 22 bp, Artificial Sequence
  chemically synthesized
caagacttcaactcctaccact

SEQ ID NO: 35282 - DNA, 22 bp, Artificial Sequence
  chemically synthesized
caactcctaccactgacatcat

SEQ ID NO: 35283 - DNA, 22 bp, Artificial Sequence
  chemically synthesized
aactcctaccactgacatcatg

SEQ ID NO: 35284 - DNA, 22 bp, Artificial Sequence
  chemically synthesized
ctaccactgacatcatgaccct

SEQ ID NO: 35285 - DNA, 22 bp, Artificial Sequence
  chemically synthesized
ccactgacatcatgaccctcag

SEQ ID NO: 35286 - DNA, 22 bp, Artificial Sequence
  chemically synthesized
acatcatgaccctcagttctat

SEQ ID NO: 35287 - DNA, 22 bp, Artificial Sequence
  chemically synthesized
agttctattcccctagccctgc

SEQ ID NO: 35288 - DNA, 22 bp, Artificial Sequence
  chemically synthesized
tattcccctagccctgcccact

SEQ ID NO: 35289 - DNA, 22 bp, Artificial Sequence
  chemically synthesized
ttcccctagccctgcccactcc

SEQ ID NO: 35290 - DNA, 22 bp, Artificial Sequence
  chemically synthesized
ccctagccctgcccactcccct

SEQ ID NO: 35291 - DNA, 22 bp, Artificial Sequence
  chemically synthesized
gccctgcccactcccctgaaat

SEQ ID NO: 35292 - DNA, 22 bp, Artificial Sequence
  chemically synthesized
cccactcccctgaaatccagat

SEQ ID NO: 35293 - DNA, 22 bp, Artificial Sequence
  chemically synthesized
ccctgaaatccagatccataaa

SEQ ID NO: 35294 - DNA, 22 bp, Artificial Sequence
  chemically synthesized
aaatccagatccataaatccaa

SEQ ID NO: 35295 - DNA, 22 bp, Artificial Sequence
  chemically synthesized
ggtatctcagtttggctgtccc

SEQ ID NO: 35296 - DNA, 22 bp, Artificial Sequence
  chemically synthesized
agtttggctgtccctccatcaa

SEQ ID NO: 35297 - DNA, 22 bp, Artificial Sequence
  chemically synthesized
ggctgtccctccatcaactcaa

SEQ ID NO: 35298 - DNA, 22 bp, Artificial Sequence
  chemically synthesized
gctgtccctccatcaactcaaa

SEQ ID NO: 35299 - DNA, 22 bp, Artificial Sequence
  chemically synthesized
tccctccatcaactcaaatttg

SEQ ID NO: 35300 - DNA, 22 bp, Artificial Sequence
  chemically synthesized
catcaactcaaatttggctgac

SEQ ID NO: 35301 - DNA, 22 bp, Artificial Sequence
  chemically synthesized
aaatttggctgacacagttttg

SEQ ID NO: 35302 - DNA, 22 bp, Artificial Sequence
  chemically synthesized
ggctgacacagttttggattct

SEQ ID NO: 35303 - DNA, 22 bp, Artificial Sequence
  chemically synthesized
gctgacacagttttggattcta

SEQ ID NO: 35304 - DNA, 22 bp, Artificial Sequence
  chemically synthesized
acacagttttggattctagagc

SEQ ID NO: 35305 - DNA, 22 bp, Artificial Sequence
  chemically synthesized
tggattctagagcatgcaggca

SEQ ID NO: 35306 - DNA, 22 bp, Artificial Sequence
  chemically synthesized
ggattctagagcatgcaggcat

SEQ ID NO: 35307 - DNA, 22 bp, Artificial Sequence
  chemically synthesized
gattctagagcatgcaggcatt

SEQ ID NO: 35308 - DNA, 22 bp, Artificial Sequence
  chemically synthesized
tagagcatgcaggcattctgta

SEQ ID NO: 35309 - DNA, 22 bp, Artificial Sequence
  chemically synthesized
gagcatgcaggcattctgtatg

SEQ ID NO: 35310 - DNA, 22 bp, Artificial Sequence
  chemically synthesized
tgtatgtgctgtgcctttgcac

SEQ ID NO: 35311 - DNA, 22 bp, Artificial Sequence
  chemically synthesized
tatgtgctgtgcctttgcactc

SEQ ID NO: 35312 - DNA, 22 bp, Artificial Sequence
  chemically synthesized
tgcctttgcactcactcttccc

SEQ ID NO: 35313 - DNA, 22 bp, Artificial Sequence
  chemically synthesized
tgcactcactcttccctccaga

SEQ ID NO: 35314 - DNA, 22 bp, Artificial Sequence
  chemically synthesized
gcactcactcttccctccagac

SEQ ID NO: 35315 - DNA, 22 bp, Artificial Sequence
  chemically synthesized
cactcactcttccctccagacc

SEQ ID NO: 35316 - DNA, 22 bp, Artificial Sequence
  chemically synthesized
actcttccctccagaccccgtc

SEQ ID NO: 35317 - DNA, 22 bp, Artificial Sequence
  chemically synthesized
ttccctccagaccccgtccttc

SEQ ID NO: 35318 - DNA, 22 bp, Artificial Sequence
  chemically synthesized
ccctccagaccccgtccttcct

SEQ ID NO: 35319 - DNA, 22 bp, Artificial Sequence
  chemically synthesized
cctccagaccccgtccttcctc

SEQ ID NO: 35320 - DNA, 22 bp, Artificial Sequence
  chemically synthesized
cagaccccgtccttcctcactt

SEQ ID NO: 35321 - DNA, 22 bp, Artificial Sequence
  chemically synthesized
cctcactttgccagttccaact

SEQ ID NO: 35322 - DNA, 22 bp, Artificial Sequence
  chemically synthesized
ctcactttgccagttccaactt

SEQ ID NO: 35323 - DNA, 22 bp, Artificial Sequence
  chemically synthesized
actttgccagttccaacttctc

SEQ ID NO: 35324 - DNA, 22 bp, Artificial Sequence
  chemically synthesized
tgccagttccaacttctctctg

SEQ ID NO: 35325 - DNA, 22 bp, Artificial Sequence
  chemically synthesized
gccagttccaacttctctctga

SEQ ID NO: 35326 - DNA, 22 bp, Artificial Sequence
  chemically synthesized
ccagttccaacttctctctgaa

SEQ ID NO: 35327 - DNA, 22 bp, Artificial Sequence
  chemically synthesized
caacttctctctgaagactcag

SEQ ID NO: 35328 - DNA, 22 bp, Artificial Sequence
  chemically synthesized
ctctctgaagactcagtttagg

SEQ ID NO: 35329 - DNA, 22 bp, Artificial Sequence
  chemically synthesized
tctctgaagactcagtttaggt

SEQ ID NO: 35330 - DNA, 22 bp, Artificial Sequence
  chemically synthesized
tctgaagactcagtttaggtac

SEQ ID NO: 35331 - DNA, 22 bp, Artificial Sequence
  chemically synthesized
tgaagactcagtttaggtacag

SEQ ID NO: 35332 - DNA, 22 bp, Artificial Sequence
  chemically synthesized
aagactcagtttaggtacaggc

SEQ ID NO: 35333 - DNA, 22 bp, Artificial Sequence
  chemically synthesized
agtttaggtacaggctccttta

SEQ ID NO: 35334 - DNA, 22 bp, Artificial Sequence
  chemically synthesized
aggtacaggctcctttaggaaa

SEQ ID NO: 35335 - DNA, 22 bp, Artificial Sequence
  chemically synthesized
ggtacaggctcctttaggaaat

SEQ ID NO: 35336 - DNA, 22 bp, Artificial Sequence
  chemically synthesized
ctttaggaaatttttttttgac

SEQ ID NO: 35337 - DNA, 22 bp, Artificial Sequence
  chemically synthesized
taggaaatttttttttgactct

SEQ ID NO: 35338 - DNA, 22 bp, Artificial Sequence
  chemically synthesized
aggaaatttttttttgactcta

SEQ ID NO: 35339 - DNA, 22 bp, Artificial Sequence
  chemically synthesized
ggaaatttttttttgactctac

SEQ ID NO: 35340 - DNA, 22 bp, Artificial Sequence
  chemically synthesized
ttttttgactctacctagccca

SEQ ID NO: 35341 - DNA, 22 bp, Artificial Sequence
  chemically synthesized
tttttgactctacctagcccag

SEQ ID NO: 35342 - DNA, 22 bp, Artificial Sequence
  chemically synthesized
ttttgactctacctagcccaga

SEQ ID NO: 35343 - DNA, 22 bp, Artificial Sequence
  chemically synthesized
tttgactctacctagcccagac

SEQ ID NO: 35344 - DNA, 22 bp, Artificial Sequence
  chemically synthesized
ttgactctacctagcccagact

SEQ ID NO: 35345 - DNA, 22 bp, Artificial Sequence
  chemically synthesized
tgactctacctagcccagactc

SEQ ID NO: 35346 - DNA, 22 bp, Artificial Sequence
  chemically synthesized
gactctacctagcccagactca

SEQ ID NO: 35347 - DNA, 22 bp, Artificial Sequence
  chemically synthesized
actctacctagcccagactcag

SEQ ID NO: 35348 - DNA, 22 bp, Artificial Sequence
  chemically synthesized
tacctagcccagactcagttca

SEQ ID NO: 35349 - DNA, 22 bp, Artificial Sequence
  chemically synthesized
cctagcccagactcagttcatc

SEQ ID NO: 35350 - DNA, 22 bp, Artificial Sequence
  chemically synthesized
gcccagactcagttcatctacg

SEQ ID NO: 35351 - DNA, 22 bp, Artificial Sequence
  chemically synthesized
agttcatctacgatattaatct

SEQ ID NO: 35352 - DNA, 22 bp, Artificial Sequence
  chemically synthesized
atctacgatattaatctgcagt

SEQ ID NO: 35353 - DNA, 22 bp, Artificial Sequence
  chemically synthesized
cgatattaatctgcagtgtcat

SEQ ID NO: 35354 - DNA, 22 bp, Artificial Sequence
  chemically synthesized
atctgcagtgtcatgcactagc

SEQ ID NO: 35355 - DNA, 22 bp, Artificial Sequence
  chemically synthesized
cagtgtcatgcactagcacaaa

SEQ ID NO: 35356 - DNA, 22 bp, Artificial Sequence
  chemically synthesized
gcacaaaatatttgctgaatga

SEQ ID NO: 35357 - DNA, 22 bp, Artificial Sequence
  chemically synthesized
gctgaatgaaagaatgagagtt

SEQ ID NO: 35358 - DNA, 22 bp, Artificial Sequence
  chemically synthesized
ctgaatgaaagaatgagagtta

SEQ ID NO: 35359 - DNA, 22 bp, Artificial Sequence
  chemically synthesized
aatgaaagaatgagagttaact

SEQ ID NO: 35360 - DNA, 22 bp, Artificial Sequence
  chemically synthesized
acttttagtcaggcataaagat

SEQ ID NO: 35361 - DNA, 22 bp, Artificial Sequence
  chemically synthesized
ttagtcaggcataaagataaaa

SEQ ID NO: 35362 - DNA, 22 bp, Artificial Sequence
  chemically synthesized
tagtcaggcataaagataaaaa

SEQ ID NO: 35363 - DNA, 22 bp, Artificial Sequence
  chemically synthesized
agtcaggcataaagataaaaaa

SEQ ID NO: 35364 - DNA, 22 bp, Artificial Sequence
  chemically synthesized
gtcaggcataaagataaaaaac

SEQ ID NO: 35365 - DNA, 22 bp, Artificial Sequence
  chemically synthesized
ttactccggtgtggagtgtttt

SEQ ID NO: 35366 - DNA, 22 bp, Artificial Sequence
  chemically synthesized
tactccggtgtggagtgttttc

SEQ ID NO: 35367 - DNA, 22 bp, Artificial Sequence
  chemically synthesized
actccggtgtggagtgttttca

SEQ ID NO: 35368 - DNA, 22 bp, Artificial Sequence
  chemically synthesized
ctccggtgtggagtgttttcag

SEQ ID NO: 35369 - DNA, 22 bp, Artificial Sequence
  chemically synthesized
cggtgtggagtgttttcaggat

SEQ ID NO: 35370 - DNA, 22 bp, Artificial Sequence
  chemically synthesized
tcaggattcctaccaattagga

SEQ ID NO: 35371 - DNA, 22 bp, Artificial Sequence
  chemically synthesized
caggattcctaccaattaggaa

SEQ ID NO: 35372 - DNA, 22 bp, Artificial Sequence
  chemically synthesized
aggattcctaccaattaggaag

SEQ ID NO: 35373 - DNA, 22 bp, Artificial Sequence
  chemically synthesized
ctaccaattaggaaggtgtttg

SEQ ID NO: 35374 - DNA, 22 bp, Artificial Sequence
  chemically synthesized
ccaattaggaaggtgtttgatt

SEQ ID NO: 35375 - DNA, 22 bp, Artificial Sequence
  chemically synthesized
ggaaggtgtttgattcttcaaa

SEQ ID NO: 35376 - DNA, 22 bp, Artificial Sequence
  chemically synthesized
gattcttcaaactcagaaacac

SEQ ID NO: 35377 - DNA, 22 bp, Artificial Sequence
  chemically synthesized
attcttcaaactcagaaacacc

SEQ ID NO: 35378 - DNA, 22 bp, Artificial Sequence
  chemically synthesized
ttcaaactcagaaacacctccc

SEQ ID NO: 35379 - DNA, 22 bp, Artificial Sequence
  chemically synthesized
caaactcagaaacacctcccct

SEQ ID NO: 35380 - DNA, 22 bp, Artificial Sequence
  chemically synthesized
aaactcagaaacacctcccctt

SEQ ID NO: 35381 - DNA, 22 bp, Artificial Sequence
  chemically synthesized
agaaacacctccccttaactga

SEQ ID NO: 35382 - DNA, 22 bp, Artificial Sequence
  chemically synthesized
cccttaactgatggattcttca

SEQ ID NO: 35383 - DNA, 22 bp, Artificial Sequence
  chemically synthesized
aactgatggattcttcaaactc

SEQ ID NO: 35384 - DNA, 22 bp, Artificial Sequence
  chemically synthesized
actgatggattcttcaaactca

SEQ ID NO: 35385 - DNA, 22 bp, Artificial Sequence
  chemically synthesized
atggattcttcaaactcagcat

SEQ ID NO: 35386 - DNA, 22 bp, Artificial Sequence
  chemically synthesized
ttcaaactcagcatcagttaga

SEQ ID NO: 35387 - DNA, 22 bp, Artificial Sequence
  chemically synthesized
caaactcagcatcagttagagg

SEQ ID NO: 35388 - DNA, 22 bp, Artificial Sequence
  chemically synthesized
aaactcagcatcagttagaggg

SEQ ID NO: 35389 - DNA, 22 bp, Artificial Sequence
  chemically synthesized
agcatcagttagagggcattag

SEQ ID NO: 35390 - DNA, 22 bp, Artificial Sequence
  chemically synthesized
gagggcattagggcacttctca

SEQ ID NO: 35391 - DNA, 22 bp, Artificial Sequence
  chemically synthesized
gggcacttctcaaaccctgcat

SEQ ID NO: 35392 - DNA, 22 bp, Artificial Sequence
  chemically synthesized
ctcaaaccctgcattcagggaa

SEQ ID NO: 35393 - DNA, 22 bp, Artificial Sequence
  chemically synthesized
tcaaaccctgcattcagggaag

SEQ ID NO: 35394 - DNA, 22 bp, Artificial Sequence
  chemically synthesized
aaaccctgcattcagggaagat

SEQ ID NO: 35395 - DNA, 22 bp, Artificial Sequence
  chemically synthesized
cattcagggaagatgtctgttg

SEQ ID NO: 35396 - DNA, 22 bp, Artificial Sequence
  chemically synthesized
agggaagatgtctgttgtgggg

SEQ ID NO: 35397 - DNA, 22 bp, Artificial Sequence
  chemically synthesized
ttgtggggtggtctggcctact

SEQ ID NO: 35398 - DNA, 22 bp, Artificial Sequence
  chemically synthesized
tggggtggtctggcctacttgg

SEQ ID NO: 35399 - DNA, 22 bp, Artificial Sequence
  chemically synthesized
gcctacttggcctgagccaagg

SEQ ID NO: 35400 - DNA, 22 bp, Artificial Sequence
  chemically synthesized
cttggcctgagccaaggttctg

SEQ ID NO: 35401 - DNA, 22 bp, Artificial Sequence
  chemically synthesized
ggcctgagccaaggttctgggc

SEQ ID NO: 35402 - DNA, 22 bp, Artificial Sequence
  chemically synthesized
gcctgagccaaggttctgggca

SEQ ID NO: 35403 - DNA, 22 bp, Artificial Sequence
  chemically synthesized
agccaaggttctgggcagttct

SEQ ID NO: 35404 - DNA, 22 bp, Artificial Sequence
  chemically synthesized
tgggcagttctgttcagttaca

SEQ ID NO: 35405 - DNA, 22 bp, Artificial Sequence
  chemically synthesized
ggcagttctgttcagttacaca

SEQ ID NO: 35406 - DNA, 22 bp, Artificial Sequence
  chemically synthesized
tgttcagttacacatgcatgcg

SEQ ID NO: 35407 - DNA, 22 bp, Artificial Sequence
  chemically synthesized
ttcagttacacatgcatgcgtt

SEQ ID NO: 35408 - DNA, 22 bp, Artificial Sequence
  chemically synthesized
agttacacatgcatgcgttgag

SEQ ID NO: 35409 - DNA, 22 bp, Artificial Sequence
  chemically synthesized
cacatgcatgcgttgagcattg

SEQ ID NO: 35410 - DNA, 22 bp, Artificial Sequence
  chemically synthesized
agcattgattcaagcctggcct

SEQ ID NO: 35411 - DNA, 22 bp, Artificial Sequence
  chemically synthesized
attcaagcctggcctgggcact

SEQ ID NO: 35412 - DNA, 22 bp, Artificial Sequence
  chemically synthesized
aagcctggcctgggcactaggc

SEQ ID NO: 35413 - DNA, 22 bp, Artificial Sequence
  chemically synthesized
gcctgggcactaggcatggttt

SEQ ID NO: 35414 - DNA, 22 bp, Artificial Sequence
  chemically synthesized
ggcactaggcatggttttagat

SEQ ID NO: 35415 - DNA, 22 bp, Artificial Sequence
  chemically synthesized
ggcatggttttagatattaggg

SEQ ID NO: 35416 - DNA, 22 bp, Artificial Sequence
  chemically synthesized
tagatattagggacatattctg

SEQ ID NO: 35417 - DNA, 22 bp, Artificial Sequence
  chemically synthesized
agatattagggacatattctgt

SEQ ID NO: 35418 - DNA, 22 bp, Artificial Sequence
  chemically synthesized
gatattagggacatattctgtt

SEQ ID NO: 35419 - DNA, 22 bp, Artificial Sequence
  chemically synthesized
gggacatattctgttttccttg

SEQ ID NO: 35420 - DNA, 22 bp, Artificial Sequence
  chemically synthesized
tgttttccttgccttaagatac

SEQ ID NO: 35421 - DNA, 22 bp, Artificial Sequence
  chemically synthesized
ttttccttgccttaagatacca

SEQ ID NO: 35422 - DNA, 22 bp, Artificial Sequence
  chemically synthesized
tccttgccttaagataccagtc

SEQ ID NO: 35423 - DNA, 22 bp, Artificial Sequence
  chemically synthesized
ccttgccttaagataccagtct

SEQ ID NO: 35424 - DNA, 22 bp, Artificial Sequence
  chemically synthesized
cttgccttaagataccagtcta

SEQ ID NO: 35425 - DNA, 22 bp, Artificial Sequence
  chemically synthesized
gccttaagataccagtctagta

SEQ ID NO: 35426 - DNA, 22 bp, Artificial Sequence
  chemically synthesized
ccttaagataccagtctagtag

SEQ ID NO: 35427 - DNA, 22 bp, Artificial Sequence
  chemically synthesized
aagataccagtctagtaggagc

SEQ ID NO: 35428 - DNA, 22 bp, Artificial Sequence
  chemically synthesized
agataccagtctagtaggagcc

SEQ ID NO: 35429 - DNA, 22 bp, Artificial Sequence
  chemically synthesized
gtaggagccactaaggcccctt

SEQ ID NO: 35430 - DNA, 22 bp, Artificial Sequence
  chemically synthesized
aggcccctttttgagcctggac

SEQ ID NO: 35431 - DNA, 22 bp, Artificial Sequence
  chemically synthesized
tttgagcctggacttcgcattc

SEQ ID NO: 35432 - DNA, 22 bp, Artificial Sequence
  chemically synthesized
ttgagcctggacttcgcattca

SEQ ID NO: 35433 - DNA, 22 bp, Artificial Sequence
  chemically synthesized
tgagcctggacttcgcattcaa

SEQ ID NO: 35434 - DNA, 22 bp, Artificial Sequence
  chemically synthesized
gagcctggacttcgcattcaaa

SEQ ID NO: 35435 - DNA, 22 bp, Artificial Sequence
  chemically synthesized
agcctggacttcgcattcaaac

SEQ ID NO: 35436 - DNA, 22 bp, Artificial Sequence
  chemically synthesized
gacttcgcattcaaacataccc

SEQ ID NO: 35437 - DNA, 22 bp, Artificial Sequence
  chemically synthesized
cgcattcaaacataccctgctt

SEQ ID NO: 35438 - DNA, 22 bp, Artificial Sequence
  chemically synthesized
gcattcaaacataccctgcttc

SEQ ID NO: 35439 - DNA, 22 bp, Artificial Sequence
  chemically synthesized
aaacataccctgcttctaatca

SEQ ID NO: 35440 - DNA, 22 bp, Artificial Sequence
  chemically synthesized
cttctaatcaagtcatctattg

SEQ ID NO: 35441 - DNA, 22 bp, Artificial Sequence
  chemically synthesized
ctaatcaagtcatctattggca

SEQ ID NO: 35442 - DNA, 22 bp, Artificial Sequence
  chemically synthesized
taatcaagtcatctattggcag

SEQ ID NO: 35443 - DNA, 22 bp, Artificial Sequence
  chemically synthesized
atcaagtcatctattggcagtg

SEQ ID NO: 35444 - DNA, 22 bp, Artificial Sequence
  chemically synthesized
ttggcagtgaccttgggcaaat

SEQ ID NO: 35445 - DNA, 22 bp, Artificial Sequence
  chemically synthesized
gcagtgaccttgggcaaatcat

SEQ ID NO: 35446 - DNA, 22 bp, Artificial Sequence
  chemically synthesized
gggcaaatcatagtctctccaa

SEQ ID NO: 35447 - DNA, 22 bp, Artificial Sequence
  chemically synthesized
ggcaaatcatagtctctccaag

SEQ ID NO: 35448 - DNA, 22 bp, Artificial Sequence
  chemically synthesized
tccaagcattacttttctaatt

SEQ ID NO: 35449 - DNA, 22 bp, Artificial Sequence
  chemically synthesized
caagcattacttttctaattga

SEQ ID NO: 35450 - DNA, 22 bp, Artificial Sequence
  chemically synthesized
cttttctaattgaaacaagaac

SEQ ID NO: 35451 - DNA, 22 bp, Artificial Sequence
  chemically synthesized
ttctaattgaaacaagaacctc

SEQ ID NO: 35452 - DNA, 22 bp, Artificial Sequence
  chemically synthesized
tctaattgaaacaagaacctct

SEQ ID NO: 35453 - DNA, 22 bp, Artificial Sequence
  chemically synthesized
ctaattgaaacaagaacctctc

SEQ ID NO: 35454 - DNA, 22 bp, Artificial Sequence
  chemically synthesized
taattgaaacaagaacctctct

SEQ ID NO: 35455 - DNA, 22 bp, Artificial Sequence
  chemically synthesized
attgaaacaagaacctctctct

SEQ ID NO: 35456 - DNA, 22 bp, Artificial Sequence
  chemically synthesized
aaacaagaacctctctctatac

SEQ ID NO: 35457 - DNA, 22 bp, Artificial Sequence
  chemically synthesized
tctctataccccagatttattt

SEQ ID NO: 35458 - DNA, 22 bp, Artificial Sequence
  chemically synthesized
tctataccccagatttattttg

SEQ ID NO: 35459 - DNA, 22 bp, Artificial Sequence
  chemically synthesized
tataccccagatttattttgag

SEQ ID NO: 35460 - DNA, 22 bp, Artificial Sequence
  chemically synthesized
taccccagatttattttgagga

SEQ ID NO: 35461 - DNA, 22 bp, Artificial Sequence
  chemically synthesized
attttgaggattatgagttaat

SEQ ID NO: 35462 - DNA, 22 bp, Artificial Sequence
  chemically synthesized
ttttgaggattatgagttaatt

SEQ ID NO: 35463 - DNA, 22 bp, Artificial Sequence
  chemically synthesized
tgaggattatgagttaattcat

SEQ ID NO: 35464 - DNA, 22 bp, Artificial Sequence
  chemically synthesized
gaggattatgagttaattcata

SEQ ID NO: 35465 - DNA, 22 bp, Artificial Sequence
  chemically synthesized
aggattatgagttaattcatag

SEQ ID NO: 35466 - DNA, 22 bp, Artificial Sequence
  chemically synthesized
tgagttaattcatagctaaaat

SEQ ID NO: 35467 - DNA, 22 bp, Artificial Sequence
  chemically synthesized
attcatagctaaaatgcttagc

SEQ ID NO: 35468 - DNA, 22 bp, Artificial Sequence
  chemically synthesized
atagctaaaatgcttagcacct

SEQ ID NO: 35469 - DNA, 22 bp, Artificial Sequence
  chemically synthesized
aaatgcttagcacctaacagca

SEQ ID NO: 35470 - DNA, 22 bp, Artificial Sequence
  chemically synthesized
agcacctaacagcacataaccc

SEQ ID NO: 35471 - DNA, 22 bp, Artificial Sequence
  chemically synthesized
gcacctaacagcacataaccca

SEQ ID NO: 35472 - DNA, 22 bp, Artificial Sequence
  chemically synthesized
acagcacataacccacacatac

SEQ ID NO: 35473 - DNA, 22 bp, Artificial Sequence
  chemically synthesized
ttcaattgcgtattactaaaaa

SEQ ID NO: 35474 - DNA, 22 bp, Artificial Sequence
  chemically synthesized
tcaattgcgtattactaaaaag

SEQ ID NO: 35475 - DNA, 22 bp, Artificial Sequence
  chemically synthesized
caattgcgtattactaaaaaga

SEQ ID NO: 35476 - DNA, 22 bp, Artificial Sequence
  chemically synthesized
aattgcgtattactaaaaagaa

SEQ ID NO: 35477 - DNA, 22 bp, Artificial Sequence
  chemically synthesized
cgtattactaaaaagaaggaat

SEQ ID NO: 35478 - DNA, 22 bp, Artificial Sequence
  chemically synthesized
ctaaaaagaaggaatgatttcc

SEQ ID NO: 35479 - DNA, 22 bp, Artificial Sequence
  chemically synthesized
aaaagaaggaatgatttcctag

SEQ ID NO: 35480 - DNA, 22 bp, Artificial Sequence
  chemically synthesized
cctagaggaggtgcttcttctg

SEQ ID NO: 35481 - DNA, 22 bp, Artificial Sequence
  chemically synthesized
ctagaggaggtgcttcttctgg

SEQ ID NO: 35482 - DNA, 22 bp, Artificial Sequence
  chemically synthesized
gaggaggtgcttcttctggcca

SEQ ID NO: 35483 - DNA, 22 bp, Artificial Sequence
  chemically synthesized
cttctggccaagggctgattca

SEQ ID NO: 35484 - DNA, 22 bp, Artificial Sequence
  chemically synthesized
ttctggccaagggctgattcag

SEQ ID NO: 35485 - DNA, 22 bp, Artificial Sequence
  chemically synthesized
ctggccaagggctgattcagag

SEQ ID NO: 35486 - DNA, 22 bp, Artificial Sequence
  chemically synthesized
tggccaagggctgattcagagc

SEQ ID NO: 35487 - DNA, 22 bp, Artificial Sequence
  chemically synthesized
gccaagggctgattcagagcct

SEQ ID NO: 35488 - DNA, 22 bp, Artificial Sequence
  chemically synthesized
attcagagccttaattaactaa

SEQ ID NO: 35489 - DNA, 22 bp, Artificial Sequence
  chemically synthesized
agagccttaattaactaaatag

SEQ ID NO: 35490 - DNA, 22 bp, Artificial Sequence
  chemically synthesized
aattaactaaatagatcaagca

SEQ ID NO: 35491 - DNA, 22 bp, Artificial Sequence
  chemically synthesized
attaactaaatagatcaagcat

SEQ ID NO: 35492 - DNA, 22 bp, Artificial Sequence
  chemically synthesized
actaaatagatcaagcatatct

SEQ ID NO: 35493 - DNA, 22 bp, Artificial Sequence
  chemically synthesized
aatagatcaagcatatctaact

SEQ ID NO: 35494 - DNA, 22 bp, Artificial Sequence
  chemically synthesized
actggtcaccggaagtggtcca

SEQ ID NO: 35495 - DNA, 22 bp, Artificial Sequence
  chemically synthesized
gtcaccggaagtggtccatgag

SEQ ID NO: 35496 - DNA, 22 bp, Artificial Sequence
  chemically synthesized
cagcaatgggaaggtgtcagag

SEQ ID NO: 35497 - DNA, 22 bp, Artificial Sequence
  chemically synthesized
ggaaaaagacatagagagaaac

SEQ ID NO: 35498 - DNA, 22 bp, Artificial Sequence
  chemically synthesized
ttaggatgtctacagatttcca

SEQ ID NO: 35499 - DNA, 22 bp, Artificial Sequence
  chemically synthesized
aggatgtctacagatttccaag

SEQ ID NO: 35500 - DNA, 22 bp, Artificial Sequence
  chemically synthesized
ggatgtctacagatttccaaga

SEQ ID NO: 35501 - DNA, 22 bp, Artificial Sequence
  chemically synthesized
cagatttccaagacaataattg

SEQ ID NO: 35502 - DNA, 22 bp, Artificial Sequence
  chemically synthesized
ccaagacaataattgaaatgaa

SEQ ID NO: 35503 - DNA, 22 bp, Artificial Sequence
  chemically synthesized
caagacaataattgaaatgaac

SEQ ID NO: 35504 - DNA, 22 bp, Artificial Sequence
  chemically synthesized
aaatgaacaaaggcaagggatg

SEQ ID NO: 35505 - DNA, 22 bp, Artificial Sequence
  chemically synthesized
catttctttcctttatcacctt

SEQ ID NO: 35506 - DNA, 22 bp, Artificial Sequence
  chemically synthesized
atttctttcctttatcaccttt

SEQ ID NO: 35507 - DNA, 22 bp, Artificial Sequence
  chemically synthesized
ctttcctttatcacctttccct

SEQ ID NO: 35508 - DNA, 22 bp, Artificial Sequence
  chemically synthesized
tttcctttatcacctttccctt

SEQ ID NO: 35509 - DNA, 22 bp, Artificial Sequence
  chemically synthesized
tcctttatcacctttcccttgt

SEQ ID NO: 35510 - DNA, 22 bp, Artificial Sequence
  chemically synthesized
cctttatcacctttcccttgtt

SEQ ID NO: 35511 - DNA, 22 bp, Artificial Sequence
  chemically synthesized
ctttatcacctttcccttgttc

SEQ ID NO: 35512 - DNA, 22 bp, Artificial Sequence
  chemically synthesized
tatcacctttcccttgttcttc

SEQ ID NO: 35513 - DNA, 22 bp, Artificial Sequence
  chemically synthesized
atcacctttcccttgttcttca

SEQ ID NO: 35514 - DNA, 22 bp, Artificial Sequence
  chemically synthesized
tcacctttcccttgttcttcag

SEQ ID NO: 35515 - DNA, 22 bp, Artificial Sequence
  chemically synthesized
tcccttgttcttcagctccagc

SEQ ID NO: 35516 - DNA, 22 bp, Artificial Sequence
  chemically synthesized
cccttgttcttcagctccagct

SEQ ID NO: 35517 - DNA, 22 bp, Artificial Sequence
  chemically synthesized
ccttgttcttcagctccagctg

SEQ ID NO: 35518 - DNA, 22 bp, Artificial Sequence
  chemically synthesized
gttcttcagctccagctgtgcc

SEQ ID NO: 35519 - DNA, 22 bp, Artificial Sequence
  chemically synthesized
ttcttcagctccagctgtgccc

SEQ ID NO: 35520 - DNA, 22 bp, Artificial Sequence
  chemically synthesized
ttcagctccagctgtgcccaca

SEQ ID NO: 35521 - DNA, 22 bp, Artificial Sequence
  chemically synthesized
cagctccagctgtgcccacaga

SEQ ID NO: 35522 - DNA, 22 bp, Artificial Sequence
  chemically synthesized
agctccagctgtgcccacagac

SEQ ID NO: 35523 - DNA, 22 bp, Artificial Sequence
  chemically synthesized
cagctgtgcccacagacaccac

SEQ ID NO: 35524 - DNA, 22 bp, Artificial Sequence
  chemically synthesized
tgcccacagacaccacagggaa

SEQ ID NO: 35525 - DNA, 22 bp, Artificial Sequence
  chemically synthesized
tgaacacaggggtttgaaccag

SEQ ID NO: 35526 - DNA, 22 bp, Artificial Sequence
  chemically synthesized
aacacaggggtttgaaccaggg

SEQ ID NO: 35527 - DNA, 22 bp, Artificial Sequence
  chemically synthesized
gaaccagggcctctctaagtct

SEQ ID NO: 35528 - DNA, 22 bp, Artificial Sequence
  chemically synthesized
aaccagggcctctctaagtctt

SEQ ID NO: 35529 - DNA, 22 bp, Artificial Sequence
  chemically synthesized
tctaagtcttttccaactctga

SEQ ID NO: 35530 - DNA, 22 bp, Artificial Sequence
  chemically synthesized
taagtcttttccaactctgata

SEQ ID NO: 35531 - DNA, 22 bp, Artificial Sequence
  chemically synthesized
agtcttttccaactctgatacc

SEQ ID NO: 35532 - DNA, 22 bp, Artificial Sequence
  chemically synthesized
ttccaactctgataccctgaag

SEQ ID NO: 35533 - DNA, 22 bp, Artificial Sequence
  chemically synthesized
tccaactctgataccctgaagt

SEQ ID NO: 35534 - DNA, 22 bp, Artificial Sequence
  chemically synthesized
ccaactctgataccctgaagtt

SEQ ID NO: 35535 - DNA, 22 bp, Artificial Sequence
  chemically synthesized
caactctgataccctgaagttc

SEQ ID NO: 35536 - DNA, 22 bp, Artificial Sequence
  chemically synthesized
tgataccctgaagttctcagaa

SEQ ID NO: 35537 - DNA, 22 bp, Artificial Sequence
  chemically synthesized
ataccctgaagttctcagaaac

SEQ ID NO: 35538 - DNA, 22 bp, Artificial Sequence
  chemically synthesized
aagttctcagaaacttccataa

SEQ ID NO: 35539 - DNA, 22 bp, Artificial Sequence
  chemically synthesized
tcagaaacttccataaattttg

SEQ ID NO: 35540 - DNA, 22 bp, Artificial Sequence
  chemically synthesized
agaaacttccataaattttggc

SEQ ID NO: 35541 - DNA, 22 bp, Artificial Sequence
  chemically synthesized
ccataaattttggctgaagaag

SEQ ID NO: 35542 - DNA, 22 bp, Artificial Sequence
  chemically synthesized
cataaattttggctgaagaagc

SEQ ID NO: 35543 - DNA, 22 bp, Artificial Sequence
  chemically synthesized
tggctgaagaagccatagcaaa

SEQ ID NO: 35544 - DNA, 22 bp, Artificial Sequence
  chemically synthesized
ggctgaagaagccatagcaaac

SEQ ID NO: 35545 - DNA, 22 bp, Artificial Sequence
  chemically synthesized
gctgaagaagccatagcaaact

SEQ ID NO: 35546 - DNA, 22 bp, Artificial Sequence
  chemically synthesized
aagaagccatagcaaacttgtc

SEQ ID NO: 35547 - DNA, 22 bp, Artificial Sequence
  chemically synthesized
gtcagatggtttcttaccttta

SEQ ID NO: 35548 - DNA, 22 bp, Artificial Sequence
  chemically synthesized
tcagatggtttcttacctttaa

SEQ ID NO: 35549 - DNA, 22 bp, Artificial Sequence
  chemically synthesized
cttacctttaactcagccattt

SEQ ID NO: 35550 - DNA, 22 bp, Artificial Sequence
  chemically synthesized
ttacctttaactcagccatttt

SEQ ID NO: 35551 - DNA, 22 bp, Artificial Sequence
  chemically synthesized
acctttaactcagccattttct

SEQ ID NO: 35552 - DNA, 22 bp, Artificial Sequence
  chemically synthesized
cctttaactcagccattttctc

SEQ ID NO: 35553 - DNA, 22 bp, Artificial Sequence
  chemically synthesized
taactcagccattttctctctc

SEQ ID NO: 35554 - DNA, 22 bp, Artificial Sequence
  chemically synthesized
aactcagccattttctctctcc

SEQ ID NO: 35555 - DNA, 22 bp, Artificial Sequence
  chemically synthesized
actcagccattttctctctcct

SEQ ID NO: 35556 - DNA, 22 bp, Artificial Sequence
  chemically synthesized
agccattttctctctcctctat

SEQ ID NO: 35557 - DNA, 22 bp, Artificial Sequence
  chemically synthesized
tctctctcctctatgtgtggtg

SEQ ID NO: 35558 - DNA, 22 bp, Artificial Sequence
  chemically synthesized
ctctctcctctatgtgtggtga

SEQ ID NO: 35559 - DNA, 22 bp, Artificial Sequence
  chemically synthesized
tctctcctctatgtgtggtgac

SEQ ID NO: 35560 - DNA, 22 bp, Artificial Sequence
  chemically synthesized
tctcctctatgtgtggtgactt

SEQ ID NO: 35561 - DNA, 22 bp, Artificial Sequence
  chemically synthesized
tcctctatgtgtggtgacttca

SEQ ID NO: 35562 - DNA, 22 bp, Artificial Sequence
  chemically synthesized
ctctatgtgtggtgacttcagg

SEQ ID NO: 35563 - DNA, 22 bp, Artificial Sequence
  chemically synthesized
tatgtgtggtgacttcaggaaa

SEQ ID NO: 35564 - DNA, 22 bp, Artificial Sequence
  chemically synthesized
tgtgtggtgacttcaggaaacc

SEQ ID NO: 35565 - DNA, 22 bp, Artificial Sequence
  chemically synthesized
caggaaacccaggcccagagga

SEQ ID NO: 35566 - DNA, 22 bp, Artificial Sequence
  chemically synthesized
aggaaacccaggcccagaggat

SEQ ID NO: 35567 - DNA, 22 bp, Artificial Sequence
  chemically synthesized
ctttctccttcaaaccactctt

SEQ ID NO: 35568 - DNA, 22 bp, Artificial Sequence
  chemically synthesized
tttctccttcaaaccactcttt

SEQ ID NO: 35569 - DNA, 22 bp, Artificial Sequence
  chemically synthesized
tctccttcaaaccactctttgg

SEQ ID NO: 35570 - DNA, 22 bp, Artificial Sequence
  chemically synthesized
ctccttcaaaccactctttgga

SEQ ID NO: 35571 - DNA, 22 bp, Artificial Sequence
  chemically synthesized
tccttcaaaccactctttggat

SEQ ID NO: 35572 - DNA, 22 bp, Artificial Sequence
  chemically synthesized
cttcaaaccactctttggatat

SEQ ID NO: 35573 - DNA, 22 bp, Artificial Sequence
  chemically synthesized
caaaccactctttggatattcc

SEQ ID NO: 35574 - DNA, 22 bp, Artificial Sequence
  chemically synthesized
aaaccactctttggatattccg

SEQ ID NO: 35575 - DNA, 22 bp, Artificial Sequence
  chemically synthesized
tttggatattccggttcccact

SEQ ID NO: 35576 - DNA, 22 bp, Artificial Sequence
  chemically synthesized
tggatattccggttcccactgc

SEQ ID NO: 35577 - DNA, 22 bp, Artificial Sequence
  chemically synthesized
ggatattccggttcccactgct

SEQ ID NO: 35578 - DNA, 22 bp, Artificial Sequence
  chemically synthesized
gatattccggttcccactgctt

SEQ ID NO: 35579 - DNA, 22 bp, Artificial Sequence
  chemically synthesized
cggttcccactgcttcactgcg

SEQ ID NO: 35580 - DNA, 22 bp, Artificial Sequence
  chemically synthesized
ccactgcttcactgcgcttcac

SEQ ID NO: 35581 - DNA, 22 bp, Artificial Sequence
  chemically synthesized
cttcactgcgcttcactggtca

SEQ ID NO: 35582 - DNA, 22 bp, Artificial Sequence
  chemically synthesized
cactgcgcttcactggtcagtg

SEQ ID NO: 35583 - DNA, 22 bp, Artificial Sequence
  chemically synthesized
actgcgcttcactggtcagtgc

SEQ ID NO: 35584 - DNA, 22 bp, Artificial Sequence
  chemically synthesized
cgcttcactggtcagtgcgtca

SEQ ID NO: 35585 - DNA, 22 bp, Artificial Sequence
  chemically synthesized
cactggtcagtgcgtcactcaa

SEQ ID NO: 35586 - DNA, 22 bp, Artificial Sequence
  chemically synthesized
actggtcagtgcgtcactcaaa

SEQ ID NO: 35587 - DNA, 22 bp, Artificial Sequence
  chemically synthesized
gtcagtgcgtcactcaaactag

SEQ ID NO: 35588 - DNA, 22 bp, Artificial Sequence
  chemically synthesized
aaactagctgaaagaattgtct

SEQ ID NO: 35589 - DNA, 22 bp, Artificial Sequence
  chemically synthesized
gctgaaagaattgtctaactca

SEQ ID NO: 35590 - DNA, 22 bp, Artificial Sequence
  chemically synthesized
aaagaattgtctaactcataca

SEQ ID NO: 35591 - DNA, 22 bp, Artificial Sequence
  chemically synthesized
tctaactcatacacagggacaa

SEQ ID NO: 35592 - DNA, 22 bp, Artificial Sequence
  chemically synthesized
actcatacacagggacaaagtc

SEQ ID NO: 35593 - DNA, 22 bp, Artificial Sequence
  chemically synthesized
atacacagggacaaagtccagc

SEQ ID NO: 35594 - DNA, 22 bp, Artificial Sequence
  chemically synthesized
atttaaccggttacacaattgc

SEQ ID NO: 35595 - DNA, 22 bp, Artificial Sequence
  chemically synthesized
tttaaccggttacacaattgcc

SEQ ID NO: 35596 - DNA, 22 bp, Artificial Sequence
  chemically synthesized
aaccggttacacaattgccttt

SEQ ID NO: 35597 - DNA, 22 bp, Artificial Sequence
  chemically synthesized
accggttacacaattgcctttg

SEQ ID NO: 35598 - DNA, 22 bp, Artificial Sequence
  chemically synthesized
cacaattgcctttggtttttac

SEQ ID NO: 35599 - DNA, 22 bp, Artificial Sequence
  chemically synthesized
cctttggtttttacagtttgtt

SEQ ID NO: 35600 - DNA, 22 bp, Artificial Sequence
  chemically synthesized
tggtttttacagtttgttccta

SEQ ID NO: 35601 - DNA, 22 bp, Artificial Sequence
  chemically synthesized
ggtttttacagtttgttcctaa

SEQ ID NO: 35602 - DNA, 22 bp, Artificial Sequence
  chemically synthesized
gtttttacagtttgttcctaag

SEQ ID NO: 35603 - DNA, 22 bp, Artificial Sequence
  chemically synthesized
ttacagtttgttcctaagtgtt

SEQ ID NO: 35604 - DNA, 22 bp, Artificial Sequence
  chemically synthesized
tacagtttgttcctaagtgttt

SEQ ID NO: 35605 - DNA, 22 bp, Artificial Sequence
  chemically synthesized
acagtttgttcctaagtgtttc

SEQ ID NO: 35606 - DNA, 22 bp, Artificial Sequence
  chemically synthesized
cagtttgttcctaagtgtttcc

SEQ ID NO: 35607 - DNA, 22 bp, Artificial Sequence
  chemically synthesized
gttcctaagtgtttccagaggc

SEQ ID NO: 35608 - DNA, 22 bp, Artificial Sequence
  chemically synthesized
ttcctaagtgtttccagaggct

SEQ ID NO: 35609 - DNA, 22 bp, Artificial Sequence
  chemically synthesized
ctaagtgtttccagaggcttgg

SEQ ID NO: 35610 - DNA, 22 bp, Artificial Sequence
  chemically synthesized
agtgtttccagaggcttggttc

SEQ ID NO: 35611 - DNA, 22 bp, Artificial Sequence
  chemically synthesized
ccagaggcttggttcctcttca

SEQ ID NO: 35612 - DNA, 22 bp, Artificial Sequence
  chemically synthesized
cagaggcttggttcctcttcac

SEQ ID NO: 35613 - DNA, 22 bp, Artificial Sequence
  chemically synthesized
ggttcctcttcacctgaggtag

SEQ ID NO: 35614 - DNA, 22 bp, Artificial Sequence
  chemically synthesized
gttcctcttcacctgaggtaga

SEQ ID NO: 35615 - DNA, 22 bp, Artificial Sequence
  chemically synthesized
ctcttcacctgaggtagagatt

SEQ ID NO: 35616 - DNA, 22 bp, Artificial Sequence
  chemically synthesized
ttcacctgaggtagagattgac

SEQ ID NO: 35617 - DNA, 22 bp, Artificial Sequence
  chemically synthesized
cacctgaggtagagattgacca

SEQ ID NO: 35618 - DNA, 22 bp, Artificial Sequence
  chemically synthesized
acctgaggtagagattgaccaa

SEQ ID NO: 35619 - DNA, 22 bp, Artificial Sequence
  chemically synthesized
aggtagagattgaccaattatt

SEQ ID NO: 35620 - DNA, 22 bp, Artificial Sequence
  chemically synthesized
accaattatttattccagttaa

SEQ ID NO: 35621 - DNA, 22 bp, Artificial Sequence
  chemically synthesized
tttattccagttaaaagtaggc

SEQ ID NO: 35622 - DNA, 22 bp, Artificial Sequence
  chemically synthesized
attccagttaaaagtaggctta

SEQ ID NO: 35623 - DNA, 22 bp, Artificial Sequence
  chemically synthesized
ttccagttaaaagtaggcttat

SEQ ID NO: 35624 - DNA, 22 bp, Artificial Sequence
  chemically synthesized
cagttaaaagtaggcttatttc

SEQ ID NO: 35625 - DNA, 22 bp, Artificial Sequence
  chemically synthesized
aaagtaggcttatttcaaaagg

SEQ ID NO: 35626 - DNA, 22 bp, Artificial Sequence
  chemically synthesized
atttcaaaaggcagagaatttg

SEQ ID NO: 35627 - DNA, 22 bp, Artificial Sequence
  chemically synthesized
tttcaaaaggcagagaatttga

SEQ ID NO: 35628 - DNA, 22 bp, Artificial Sequence
  chemically synthesized
caaaaggcagagaatttgaagc

SEQ ID NO: 35629 - DNA, 22 bp, Artificial Sequence
  chemically synthesized
aaaaggcagagaatttgaagct

SEQ ID NO: 35630 - DNA, 22 bp, Artificial Sequence
  chemically synthesized
gaagctatcggggaaaggaact

SEQ ID NO: 35631 - DNA, 22 bp, Artificial Sequence
  chemically synthesized
aagctatcggggaaaggaactg

SEQ ID NO: 35632 - DNA, 22 bp, Artificial Sequence
  chemically synthesized
tcggggaaaggaactgtggcag

SEQ ID NO: 35633 - DNA, 22 bp, Artificial Sequence
  chemically synthesized
tggcagatagtgcctgctgtgt

SEQ ID NO: 35634 - DNA, 22 bp, Artificial Sequence
  chemically synthesized
ctgtgtgtggtggaggattctc

SEQ ID NO: 35635 - DNA, 22 bp, Artificial Sequence
  chemically synthesized
tgtgtggtggaggattctctgc

SEQ ID NO: 35636 - DNA, 22 bp, Artificial Sequence
  chemically synthesized
tctgctcagtcctgactcaggc

SEQ ID NO: 35637 - DNA, 22 bp, Artificial Sequence
  chemically synthesized
tgctcagtcctgactcaggcta

SEQ ID NO: 35638 - DNA, 22 bp, Artificial Sequence
  chemically synthesized
ctcagtcctgactcaggctagg

SEQ ID NO: 35639 - DNA, 22 bp, Artificial Sequence
  chemically synthesized
agtcctgactcaggctaggaag

SEQ ID NO: 35640 - DNA, 22 bp, Artificial Sequence
  chemically synthesized
actcaggctaggaaggaacagg

SEQ ID NO: 35641 - DNA, 22 bp, Artificial Sequence
  chemically synthesized
aggctaggaaggaacagggcag

SEQ ID NO: 35642 - DNA, 22 bp, Artificial Sequence
  chemically synthesized
ggaaggaacagggcagtgctga

SEQ ID NO: 35643 - DNA, 22 bp, Artificial Sequence
  chemically synthesized
caggagactcagcactgccctg

SEQ ID NO: 35644 - DNA, 22 bp, Artificial Sequence
  chemically synthesized
agcactgccctgttccttccta

SEQ ID NO: 35645 - DNA, 22 bp, Artificial Sequence
  chemically synthesized
ccctgttccttcctagcctgag

SEQ ID NO: 35646 - DNA, 22 bp, Artificial Sequence
  chemically synthesized
ttccttcctagcctgagtcagg

SEQ ID NO: 35647 - DNA, 22 bp, Artificial Sequence
  chemically synthesized
cttcctagcctgagtcaggact

SEQ ID NO: 35648 - DNA, 22 bp, Artificial Sequence
  chemically synthesized
cctagcctgagtcaggactgag

SEQ ID NO: 35649 - DNA, 22 bp, Artificial Sequence
  chemically synthesized
ctagcctgagtcaggactgagc

SEQ ID NO: 35650 - DNA, 22 bp, Artificial Sequence
  chemically synthesized
gcctgagtcaggactgagcaga

SEQ ID NO: 35651 - DNA, 22 bp, Artificial Sequence
  chemically synthesized
agtcaggactgagcagagaatc

SEQ ID NO: 35652 - DNA, 22 bp, Artificial Sequence
  chemically synthesized
agcagagaatcctccaccacac

SEQ ID NO: 35653 - DNA, 22 bp, Artificial Sequence
  chemically synthesized
caccacacacagcaggcactat

SEQ ID NO: 35654 - DNA, 22 bp, Artificial Sequence
  chemically synthesized
tctgccacagttcctttccccg

SEQ ID NO: 35655 - DNA, 22 bp, Artificial Sequence
  chemically synthesized
ccacagttcctttccccgatag

SEQ ID NO: 35656 - DNA, 22 bp, Artificial Sequence
  chemically synthesized
ctttccccgatagcttcaaatt

SEQ ID NO: 35657 - DNA, 22 bp, Artificial Sequence
  chemically synthesized
tccccgatagcttcaaattctc

SEQ ID NO: 35658 - DNA, 22 bp, Artificial Sequence
  chemically synthesized
ccccgatagcttcaaattctct

SEQ ID NO: 35659 - DNA, 22 bp, Artificial Sequence
  chemically synthesized
cccgatagcttcaaattctctg

SEQ ID NO: 35660 - DNA, 22 bp, Artificial Sequence
  chemically synthesized
caaattctctgccttttgaaat

SEQ ID NO: 35661 - DNA, 22 bp, Artificial Sequence
  chemically synthesized
aaattctctgccttttgaaata

SEQ ID NO: 35662 - DNA, 22 bp, Artificial Sequence
  chemically synthesized
tctgccttttgaaataagccta

SEQ ID NO: 35663 - DNA, 22 bp, Artificial Sequence
  chemically synthesized
tgccttttgaaataagcctact

SEQ ID NO: 35664 - DNA, 22 bp, Artificial Sequence
  chemically synthesized
ccttttgaaataagcctacttt

SEQ ID NO: 35665 - DNA, 22 bp, Artificial Sequence
  chemically synthesized
ttgaaataagcctacttttaac

SEQ ID NO: 35666 - DNA, 22 bp, Artificial Sequence
  chemically synthesized
tgaaataagcctacttttaact

SEQ ID NO: 35667 - DNA, 22 bp, Artificial Sequence
  chemically synthesized
gaaataagcctacttttaactg

SEQ ID NO: 35668 - DNA, 22 bp, Artificial Sequence
  chemically synthesized
aaataagcctacttttaactgg

SEQ ID NO: 35669 - DNA, 22 bp, Artificial Sequence
  chemically synthesized
cttttaactggaataaataatt

SEQ ID NO: 35670 - DNA, 22 bp, Artificial Sequence
  chemically synthesized
ttaactggaataaataattggt

SEQ ID NO: 35671 - DNA, 22 bp, Artificial Sequence
  chemically synthesized
taactggaataaataattggtc

SEQ ID NO: 35672 - DNA, 22 bp, Artificial Sequence
  chemically synthesized
aactggaataaataattggtca

SEQ ID NO: 35673 - DNA, 22 bp, Artificial Sequence
  chemically synthesized
actggaataaataattggtcaa

SEQ ID NO: 35674 - DNA, 22 bp, Artificial Sequence
  chemically synthesized
gaataaataattggtcaatctc

SEQ ID NO: 35675 - DNA, 22 bp, Artificial Sequence
  chemically synthesized
gtcaatctctacctcaggtgaa

SEQ ID NO: 35676 - DNA, 22 bp, Artificial Sequence
  chemically synthesized
tacctcaggtgaagaggaacca

SEQ ID NO: 35677 - DNA, 22 bp, Artificial Sequence
  chemically synthesized
cctcaggtgaagaggaaccaag

SEQ ID NO: 35678 - DNA, 22 bp, Artificial Sequence
  chemically synthesized
aggtgaagaggaaccaagcctc

SEQ ID NO: 35679 - DNA, 22 bp, Artificial Sequence
  chemically synthesized
tggaaacacttaggaacaaact

SEQ ID NO: 35680 - DNA, 22 bp, Artificial Sequence
  chemically synthesized
gaaacacttaggaacaaactgt

SEQ ID NO: 35681 - DNA, 22 bp, Artificial Sequence
  chemically synthesized
aggaacaaactgtaaaaaccaa

SEQ ID NO: 35682 - DNA, 22 bp, Artificial Sequence
  chemically synthesized
ggaacaaactgtaaaaaccaaa

SEQ ID NO: 35683 - DNA, 22 bp, Artificial Sequence
  chemically synthesized
taaaaaccaaaggcaattgtgt

SEQ ID NO: 35684 - DNA, 22 bp, Artificial Sequence
  chemically synthesized
tgtaaccggttaaataagcttg

SEQ ID NO: 35685 - DNA, 22 bp, Artificial Sequence
  chemically synthesized
aataagcttgctggactttgtc

SEQ ID NO: 35686 - DNA, 22 bp, Artificial Sequence
  chemically synthesized
gctggactttgtccctgtgtat

SEQ ID NO: 35687 - DNA, 22 bp, Artificial Sequence
  chemically synthesized
ctggactttgtccctgtgtatg

SEQ ID NO: 35688 - DNA, 22 bp, Artificial Sequence
  chemically synthesized
gactttgtccctgtgtatgagt

SEQ ID NO: 35689 - DNA, 22 bp, Artificial Sequence
  chemically synthesized
tgtccctgtgtatgagttagac

SEQ ID NO: 35690 - DNA, 22 bp, Artificial Sequence
  chemically synthesized
gtccctgtgtatgagttagaca

SEQ ID NO: 35691 - DNA, 22 bp, Artificial Sequence
  chemically synthesized
tccctgtgtatgagttagacaa

SEQ ID NO: 35692 - DNA, 22 bp, Artificial Sequence
  chemically synthesized
tgtatgagttagacaattcttt

SEQ ID NO: 35693 - DNA, 22 bp, Artificial Sequence
  chemically synthesized
gacaattctttcagctagtttg

SEQ ID NO: 35694 - DNA, 22 bp, Artificial Sequence
  chemically synthesized
tttcagctagtttgagtgacgc

SEQ ID NO: 35695 - DNA, 22 bp, Artificial Sequence
  chemically synthesized
tcagctagtttgagtgacgcac

SEQ ID NO: 35696 - DNA, 22 bp, Artificial Sequence
  chemically synthesized
cagctagtttgagtgacgcact

SEQ ID NO: 35697 - DNA, 22 bp, Artificial Sequence
  chemically synthesized
agctagtttgagtgacgcactg

SEQ ID NO: 35698 - DNA, 22 bp, Artificial Sequence
  chemically synthesized
gtttgagtgacgcactgaccag

SEQ ID NO: 35699 - DNA, 22 bp, Artificial Sequence
  chemically synthesized
gagtgacgcactgaccagtgaa

SEQ ID NO: 35700 - DNA, 22 bp, Artificial Sequence
  chemically synthesized
agtgacgcactgaccagtgaag

SEQ ID NO: 35701 - DNA, 22 bp, Artificial Sequence
  chemically synthesized
accagtgaagcgcagtgaagca

SEQ ID NO: 35702 - DNA, 22 bp, Artificial Sequence
  chemically synthesized
gaaggagaaagaagcattgtgg

SEQ ID NO: 35703 - DNA, 22 bp, Artificial Sequence
  chemically synthesized
aaggagaaagaagcattgtggc

SEQ ID NO: 35704 - DNA, 22 bp, Artificial Sequence
  chemically synthesized
tggctttatatcctctgggcct

SEQ ID NO: 35705 - DNA, 22 bp, Artificial Sequence
  chemically synthesized
tatatcctctgggcctgggttt

SEQ ID NO: 35706 - DNA, 22 bp, Artificial Sequence
  chemically synthesized
atatcctctgggcctgggtttc

SEQ ID NO: 35707 - DNA, 22 bp, Artificial Sequence
  chemically synthesized
tatcctctgggcctgggtttcc

SEQ ID NO: 35708 - DNA, 22 bp, Artificial Sequence
  chemically synthesized
tgggcctgggtttcctgaagtc

SEQ ID NO: 35709 - DNA, 22 bp, Artificial Sequence
  chemically synthesized
ggcctgggtttcctgaagtcac

SEQ ID NO: 35710 - DNA, 22 bp, Artificial Sequence
  chemically synthesized
ggtttcctgaagtcaccacaca

SEQ ID NO: 35711 - DNA, 22 bp, Artificial Sequence
  chemically synthesized
cctgaagtcaccacacatagag

SEQ ID NO: 35712 - DNA, 22 bp, Artificial Sequence
  chemically synthesized
ctgaagtcaccacacatagagg

SEQ ID NO: 35713 - DNA, 22 bp, Artificial Sequence
  chemically synthesized
aagtcaccacacatagaggaga

SEQ ID NO: 35714 - DNA, 22 bp, Artificial Sequence
  chemically synthesized
agttaaaggtaagaaaccatct

SEQ ID NO: 35715 - DNA, 22 bp, Artificial Sequence
  chemically synthesized
aaggtaagaaaccatctgacaa

SEQ ID NO: 35716 - DNA, 22 bp, Artificial Sequence
  chemically synthesized
acaagtttgctatggcttcttc

SEQ ID NO: 35717 - DNA, 22 bp, Artificial Sequence
  chemically synthesized
gctatggcttcttcagccaaaa

SEQ ID NO: 35718 - DNA, 22 bp, Artificial Sequence
  chemically synthesized
ctatggcttcttcagccaaaat

SEQ ID NO: 35719 - DNA, 22 bp, Artificial Sequence
  chemically synthesized
tggcttcttcagccaaaattta

SEQ ID NO: 35720 - DNA, 22 bp, Artificial Sequence
  chemically synthesized
cttcagccaaaatttatggaag

SEQ ID NO: 35721 - DNA, 22 bp, Artificial Sequence
  chemically synthesized
ttcagccaaaatttatggaagt

SEQ ID NO: 35722 - DNA, 22 bp, Artificial Sequence
  chemically synthesized
cagccaaaatttatggaagttt

SEQ ID NO: 35723 - DNA, 22 bp, Artificial Sequence
  chemically synthesized
agccaaaatttatggaagtttc

SEQ ID NO: 35724 - DNA, 22 bp, Artificial Sequence
  chemically synthesized
atggaagtttctgagaacttca

SEQ ID NO: 35725 - DNA, 22 bp, Artificial Sequence
  chemically synthesized
tggaagtttctgagaacttcag

SEQ ID NO: 35726 - DNA, 22 bp, Artificial Sequence
  chemically synthesized
ctgagaacttcagggtatcaga

SEQ ID NO: 35727 - DNA, 22 bp, Artificial Sequence
  chemically synthesized
tgagaacttcagggtatcagag

SEQ ID NO: 35728 - DNA, 22 bp, Artificial Sequence
  chemically synthesized
agaacttcagggtatcagagtt

SEQ ID NO: 35729 - DNA, 22 bp, Artificial Sequence
  chemically synthesized
cagggtatcagagttggaaaag

SEQ ID NO: 35730 - DNA, 22 bp, Artificial Sequence
  chemically synthesized
agggtatcagagttggaaaaga

SEQ ID NO: 35731 - DNA, 22 bp, Artificial Sequence
  chemically synthesized
gaaaagacttagagaggccctg

SEQ ID NO: 35732 - DNA, 22 bp, Artificial Sequence
  chemically synthesized
agagaggccctggttcaaaccc

SEQ ID NO: 35733 - DNA, 22 bp, Artificial Sequence
  chemically synthesized
gagaggccctggttcaaacccc

SEQ ID NO: 35734 - DNA, 22 bp, Artificial Sequence
  chemically synthesized
gttcaaacccctgtgttcagag

SEQ ID NO: 35735 - DNA, 22 bp, Artificial Sequence
  chemically synthesized
aaacccctgtgttcagaggctt

SEQ ID NO: 35736 - DNA, 22 bp, Artificial Sequence
  chemically synthesized
tgttcagaggcttccctgtggt

SEQ ID NO: 35737 - DNA, 22 bp, Artificial Sequence
  chemically synthesized
agaggcttccctgtggtgtctg

SEQ ID NO: 35738 - DNA, 22 bp, Artificial Sequence
  chemically synthesized
ccctgtggtgtctgtgggcaca

SEQ ID NO: 35739 - DNA, 22 bp, Artificial Sequence
  chemically synthesized
cctgtggtgtctgtgggcacag

SEQ ID NO: 35740 - DNA, 22 bp, Artificial Sequence
  chemically synthesized
tggtgtctgtgggcacagctgg

SEQ ID NO: 35741 - DNA, 22 bp, Artificial Sequence
  chemically synthesized
tgggcacagctggagctgaaga

SEQ ID NO: 35742 - DNA, 22 bp, Artificial Sequence
  chemically synthesized
gagctgaagaacaagggaaagg

SEQ ID NO: 35743 - DNA, 22 bp, Artificial Sequence
  chemically synthesized
aagaacaagggaaaggtgataa

SEQ ID NO: 35744 - DNA, 22 bp, Artificial Sequence
  chemically synthesized
ttattggtcatcccttgccttt

SEQ ID NO: 35745 - DNA, 22 bp, Artificial Sequence
  chemically synthesized
attggtcatcccttgcctttgt

SEQ ID NO: 35746 - DNA, 22 bp, Artificial Sequence
  chemically synthesized
ttggtcatcccttgcctttgtt

SEQ ID NO: 35747 - DNA, 22 bp, Artificial Sequence
  chemically synthesized
gtcatcccttgcctttgttcat

SEQ ID NO: 35748 - DNA, 22 bp, Artificial Sequence
  chemically synthesized
gcctttgttcatttcaattatt

SEQ ID NO: 35749 - DNA, 22 bp, Artificial Sequence
  chemically synthesized
cctttgttcatttcaattattg

SEQ ID NO: 35750 - DNA, 22 bp, Artificial Sequence
  chemically synthesized
tgttcatttcaattattgtctt

SEQ ID NO: 35751 - DNA, 22 bp, Artificial Sequence
  chemically synthesized
gttcatttcaattattgtcttg

SEQ ID NO: 35752 - DNA, 22 bp, Artificial Sequence
  chemically synthesized
ttcatttcaattattgtcttgg

SEQ ID NO: 35753 - DNA, 22 bp, Artificial Sequence
  chemically synthesized
atttcaattattgtcttggaaa

SEQ ID NO: 35754 - DNA, 22 bp, Artificial Sequence
  chemically synthesized
caattattgtcttggaaatctg

SEQ ID NO: 35755 - DNA, 22 bp, Artificial Sequence
  chemically synthesized
aattattgtcttggaaatctgt

SEQ ID NO: 35756 - DNA, 22 bp, Artificial Sequence
  chemically synthesized
ttgtcttggaaatctgtagaca

SEQ ID NO: 35757 - DNA, 22 bp, Artificial Sequence
  chemically synthesized
tcttggaaatctgtagacatcc

SEQ ID NO: 35758 - DNA, 22 bp, Artificial Sequence
  chemically synthesized
ggaaatctgtagacatcctaag

SEQ ID NO: 35759 - DNA, 22 bp, Artificial Sequence
  chemically synthesized
gaaatctgtagacatcctaaga

SEQ ID NO: 35760 - DNA, 22 bp, Artificial Sequence
  chemically synthesized
tagacatcctaagagctcccct

SEQ ID NO: 35761 - DNA, 22 bp, Artificial Sequence
  chemically synthesized
agagctcccctccactacggac

SEQ ID NO: 35762 - DNA, 22 bp, Artificial Sequence
  chemically synthesized
ccctccactacggacatgcacg

SEQ ID NO: 35763 - DNA, 22 bp, Artificial Sequence
  chemically synthesized
cactacggacatgcacgtttct

SEQ ID NO: 35764 - DNA, 22 bp, Artificial Sequence
  chemically synthesized
cggacatgcacgtttctctcta

SEQ ID NO: 35765 - DNA, 22 bp, Artificial Sequence
  chemically synthesized
ctctctatgtctttttcccaac

SEQ ID NO: 35766 - DNA, 22 bp, Artificial Sequence
  chemically synthesized
tctctatgtctttttcccaacc

SEQ ID NO: 35767 - DNA, 22 bp, Artificial Sequence
  chemically synthesized
tctatgtctttttcccaacccc

SEQ ID NO: 35768 - DNA, 22 bp, Artificial Sequence
  chemically synthesized
tatgtctttttcccaacccctg

SEQ ID NO: 35769 - DNA, 22 bp, Artificial Sequence
  chemically synthesized
tgtctttttcccaacccctgct

SEQ ID NO: 35770 - DNA, 22 bp, Artificial Sequence
  chemically synthesized
tttcccaacccctgctctgaca

SEQ ID NO: 35771 - DNA, 22 bp, Artificial Sequence
  chemically synthesized
ttcccaacccctgctctgacac

SEQ ID NO: 35772 - DNA, 22 bp, Artificial Sequence
  chemically synthesized
tcccaacccctgctctgacacc

SEQ ID NO: 35773 - DNA, 22 bp, Artificial Sequence
  chemically synthesized
cccaacccctgctctgacacct

SEQ ID NO: 35774 - DNA, 22 bp, Artificial Sequence
  chemically synthesized
ccaacccctgctctgacacctt

SEQ ID NO: 35775 - DNA, 22 bp, Artificial Sequence
  chemically synthesized
ctctgacaccttcccattgctg

SEQ ID NO: 35776 - DNA, 22 bp, Artificial Sequence
  chemically synthesized
tgacaccttcccattgctgcag

SEQ ID NO: 35777 - DNA, 22 bp, Artificial Sequence
  chemically synthesized
acaccttcccattgctgcagcc

SEQ ID NO: 35778 - DNA, 22 bp, Artificial Sequence
  chemically synthesized
cccattgctgcagcctcatgga

SEQ ID NO: 35779 - DNA, 22 bp, Artificial Sequence
  chemically synthesized
ccattgctgcagcctcatggac

SEQ ID NO: 35780 - DNA, 22 bp, Artificial Sequence
  chemically synthesized
ctgcagcctcatggaccacttc

SEQ ID NO: 35781 - DNA, 22 bp, Artificial Sequence
  chemically synthesized
cagcctcatggaccacttccgg

SEQ ID NO: 35782 - DNA, 22 bp, Artificial Sequence
  chemically synthesized
atggaccacttccggtgaccag

SEQ ID NO: 35783 - DNA, 22 bp, Artificial Sequence
  chemically synthesized
ccggtgaccagttagatatgct

SEQ ID NO: 35784 - DNA, 22 bp, Artificial Sequence
  chemically synthesized
cggtgaccagttagatatgctt

SEQ ID NO: 35785 - DNA, 22 bp, Artificial Sequence
  chemically synthesized
gatatgcttgatctatttagtt

SEQ ID NO: 35786 - DNA, 22 bp, Artificial Sequence
  chemically synthesized
gatctatttagttaattaaggc

SEQ ID NO: 35787 - DNA, 22 bp, Artificial Sequence
  chemically synthesized
atctatttagttaattaaggct

SEQ ID NO: 35788 - DNA, 22 bp, Artificial Sequence
  chemically synthesized
tttagttaattaaggctctgaa

SEQ ID NO: 35789 - DNA, 22 bp, Artificial Sequence
  chemically synthesized
agttaattaaggctctgaatca

SEQ ID NO: 35790 - DNA, 22 bp, Artificial Sequence
  chemically synthesized
gttaattaaggctctgaatcag

SEQ ID NO: 35791 - DNA, 22 bp, Artificial Sequence
  chemically synthesized
attaaggctctgaatcagccct

SEQ ID NO: 35792 - DNA, 22 bp, Artificial Sequence
  chemically synthesized
aggctctgaatcagcccttggc

SEQ ID NO: 35793 - DNA, 22 bp, Artificial Sequence
  chemically synthesized
tgaatcagcccttggccagaag

SEQ ID NO: 35794 - DNA, 22 bp, Artificial Sequence
  chemically synthesized
aatcagcccttggccagaagaa

SEQ ID NO: 35795 - DNA, 22 bp, Artificial Sequence
  chemically synthesized
ggccagaagaagcacctcctct

SEQ ID NO: 35796 - DNA, 22 bp, Artificial Sequence
  chemically synthesized
gccagaagaagcacctcctcta

SEQ ID NO: 35797 - DNA, 22 bp, Artificial Sequence
  chemically synthesized
ctctaggaaatcattccttctt

SEQ ID NO: 35798 - DNA, 22 bp, Artificial Sequence
  chemically synthesized
taggaaatcattccttcttttt

SEQ ID NO: 35799 - DNA, 22 bp, Artificial Sequence
  chemically synthesized
ggaaatcattccttctttttag

SEQ ID NO: 35800 - DNA, 22 bp, Artificial Sequence
  chemically synthesized
cttctttttagtaatacgcaat

SEQ ID NO: 35801 - DNA, 22 bp, Artificial Sequence
  chemically synthesized
ctttttagtaatacgcaattga

SEQ ID NO: 35802 - DNA, 22 bp, Artificial Sequence
  chemically synthesized
tttttagtaatacgcaattgaa

SEQ ID NO: 35803 - DNA, 22 bp, Artificial Sequence
  chemically synthesized
tttagtaatacgcaattgaaaa

SEQ ID NO: 35804 - DNA, 22 bp, Artificial Sequence
  chemically synthesized
ttagtaatacgcaattgaaaag

SEQ ID NO: 35805 - DNA, 22 bp, Artificial Sequence
  chemically synthesized
tagtaatacgcaattgaaaagt

SEQ ID NO: 35806 - DNA, 22 bp, Artificial Sequence
  chemically synthesized
agtaatacgcaattgaaaagta

SEQ ID NO: 35807 - DNA, 22 bp, Artificial Sequence
  chemically synthesized
gtaatacgcaattgaaaagtat

SEQ ID NO: 35808 - DNA, 22 bp, Artificial Sequence
  chemically synthesized
aaaagtatgtgtgggttatgtg

SEQ ID NO: 35809 - DNA, 22 bp, Artificial Sequence
  chemically synthesized
tgtgctgttaggtgctaagcat

SEQ ID NO: 35810 - DNA, 22 bp, Artificial Sequence
  chemically synthesized
ttaggtgctaagcattttagct

SEQ ID NO: 35811 - DNA, 22 bp, Artificial Sequence
  chemically synthesized
ggtgctaagcattttagctatg

SEQ ID NO: 35812 - DNA, 22 bp, Artificial Sequence
  chemically synthesized
agcattttagctatgaattaac

SEQ ID NO: 35813 - DNA, 22 bp, Artificial Sequence
  chemically synthesized
tagctatgaattaactcataat

SEQ ID NO: 35814 - DNA, 22 bp, Artificial Sequence
  chemically synthesized
agctatgaattaactcataatc

SEQ ID NO: 35815 - DNA, 22 bp, Artificial Sequence
  chemically synthesized
gctatgaattaactcataatcc

SEQ ID NO: 35816 - DNA, 22 bp, Artificial Sequence
  chemically synthesized
tgaattaactcataatcctcaa

SEQ ID NO: 35817 - DNA, 22 bp, Artificial Sequence
  chemically synthesized
actcataatcctcaaaataaat

SEQ ID NO: 35818 - DNA, 22 bp, Artificial Sequence
  chemically synthesized
ataatcctcaaaataaatctgg

SEQ ID NO: 35819 - DNA, 22 bp, Artificial Sequence
  chemically synthesized
aaaataaatctggggtatagag

SEQ ID NO: 35820 - DNA, 22 bp, Artificial Sequence
  chemically synthesized
gggtatagagagaggttcttgt

SEQ ID NO: 35821 - DNA, 22 bp, Artificial Sequence
  chemically synthesized
ttgtttcaattagaaaagtaat

SEQ ID NO: 35822 - DNA, 22 bp, Artificial Sequence
  chemically synthesized
gtttcaattagaaaagtaatgc

SEQ ID NO: 35823 - DNA, 22 bp, Artificial Sequence
  chemically synthesized
tttcaattagaaaagtaatgct

SEQ ID NO: 35824 - DNA, 22 bp, Artificial Sequence
  chemically synthesized
caattagaaaagtaatgcttgg

SEQ ID NO: 35825 - DNA, 22 bp, Artificial Sequence
  chemically synthesized
aattagaaaagtaatgcttgga

SEQ ID NO: 35826 - DNA, 22 bp, Artificial Sequence
  chemically synthesized
gaaaagtaatgcttggagagac

SEQ ID NO: 35827 - DNA, 22 bp, Artificial Sequence
  chemically synthesized
ggagagactatgatttgcccaa

SEQ ID NO: 35828 - DNA, 22 bp, Artificial Sequence
  chemically synthesized
gagagactatgatttgcccaag

SEQ ID NO: 35829 - DNA, 22 bp, Artificial Sequence
  chemically synthesized
tgatttgcccaaggtcactgcc

SEQ ID NO: 35830 - DNA, 22 bp, Artificial Sequence
  chemically synthesized
gcccaaggtcactgccaataga

SEQ ID NO: 35831 - DNA, 22 bp, Artificial Sequence
  chemically synthesized
cccaaggtcactgccaatagat

SEQ ID NO: 35832 - DNA, 22 bp, Artificial Sequence
  chemically synthesized
ccaatagatgacttgattagaa

SEQ ID NO: 35833 - DNA, 22 bp, Artificial Sequence
  chemically synthesized
gattagaagcagggtatgtttg

SEQ ID NO: 35834 - DNA, 22 bp, Artificial Sequence
  chemically synthesized
attagaagcagggtatgtttga

SEQ ID NO: 35835 - DNA, 22 bp, Artificial Sequence
  chemically synthesized
gaagcagggtatgtttgaatgc

SEQ ID NO: 35836 - DNA, 22 bp, Artificial Sequence
  chemically synthesized
gaatgcgaagtccaggctcaaa

SEQ ID NO: 35837 - DNA, 22 bp, Artificial Sequence
  chemically synthesized
aatgcgaagtccaggctcaaaa

SEQ ID NO: 35838 - DNA, 22 bp, Artificial Sequence
  chemically synthesized
aaaaaggggccttagtggctcc

SEQ ID NO: 35839 - DNA, 22 bp, Artificial Sequence
  chemically synthesized
agtggctcctactagactggta

SEQ ID NO: 35840 - DNA, 22 bp, Artificial Sequence
  chemically synthesized
gtggctcctactagactggtat

SEQ ID NO: 35841 - DNA, 22 bp, Artificial Sequence
  chemically synthesized
ctactagactggtatcttaagg

SEQ ID NO: 35842 - DNA, 22 bp, Artificial Sequence
  chemically synthesized
ctagactggtatcttaaggcaa

SEQ ID NO: 35843 - DNA, 22 bp, Artificial Sequence
  chemically synthesized
gactggtatcttaaggcaagga

SEQ ID NO: 35844 - DNA, 22 bp, Artificial Sequence
  chemically synthesized
gtatcttaaggcaaggaaaaca

SEQ ID NO: 35845 - DNA, 22 bp, Artificial Sequence
  chemically synthesized
aaggcaaggaaaacagaatatg

SEQ ID NO: 35846 - DNA, 22 bp, Artificial Sequence
  chemically synthesized
aggcaaggaaaacagaatatgt

SEQ ID NO: 35847 - DNA, 22 bp, Artificial Sequence
  chemically synthesized
atatctaaaaccatgcctagtg

SEQ ID NO: 35848 - DNA, 22 bp, Artificial Sequence
  chemically synthesized
aaaccatgcctagtgcccaggc

SEQ ID NO: 35849 - DNA, 22 bp, Artificial Sequence
  chemically synthesized
gtgcccaggccaggcttgaatc

SEQ ID NO: 35850 - DNA, 22 bp, Artificial Sequence
  chemically synthesized
gaatcaatgctcaacgcatgca

SEQ ID NO: 35851 - DNA, 22 bp, Artificial Sequence
  chemically synthesized
aatcaatgctcaacgcatgcat

SEQ ID NO: 35852 - DNA, 22 bp, Artificial Sequence
  chemically synthesized
aacgcatgcatgtgtaactgaa

SEQ ID NO: 35853 - DNA, 22 bp, Artificial Sequence
  chemically synthesized
aacagaactgcccagaaccttg

SEQ ID NO: 35854 - DNA, 22 bp, Artificial Sequence
  chemically synthesized
cccagaaccttggctcaggcca

SEQ ID NO: 35855 - DNA, 22 bp, Artificial Sequence
  chemically synthesized
ggctcaggccaagtaggccaga

SEQ ID NO: 35856 - DNA, 22 bp, Artificial Sequence
  chemically synthesized
gctcaggccaagtaggccagac

SEQ ID NO: 35857 - DNA, 22 bp, Artificial Sequence
  chemically synthesized
aggccaagtaggccagaccacc

SEQ ID NO: 35858 - DNA, 22 bp, Artificial Sequence
  chemically synthesized
ccctgaatgcagggtttgagaa

SEQ ID NO: 35859 - DNA, 22 bp, Artificial Sequence
  chemically synthesized
cctgaatgcagggtttgagaag

SEQ ID NO: 35860 - DNA, 22 bp, Artificial Sequence
  chemically synthesized
aatgcagggtttgagaagtgcc

SEQ ID NO: 35861 - DNA, 22 bp, Artificial Sequence
  chemically synthesized
gagaagtgccctaatgccctct

SEQ ID NO: 35862 - DNA, 22 bp, Artificial Sequence
  chemically synthesized
agaagtgccctaatgccctcta

SEQ ID NO: 35863 - DNA, 22 bp, Artificial Sequence
  chemically synthesized
atgccctctaactgatgctgag

SEQ ID NO: 35864 - DNA, 22 bp, Artificial Sequence
  chemically synthesized
taactgatgctgagtttgaaga

SEQ ID NO: 35865 - DNA, 22 bp, Artificial Sequence
  chemically synthesized
actgatgctgagtttgaagaat

SEQ ID NO: 35866 - DNA, 22 bp, Artificial Sequence
  chemically synthesized
atgctgagtttgaagaatccat

SEQ ID NO: 35867 - DNA, 22 bp, Artificial Sequence
  chemically synthesized
agtttgaagaatccatcagtta

SEQ ID NO: 35868 - DNA, 22 bp, Artificial Sequence
  chemically synthesized
gaagaatccatcagttaagggg

SEQ ID NO: 35869 - DNA, 22 bp, Artificial Sequence
  chemically synthesized
aagaatccatcagttaagggga

SEQ ID NO: 35870 - DNA, 22 bp, Artificial Sequence
  chemically synthesized
aggggaggtgtttctgagtttg

SEQ ID NO: 35871 - DNA, 22 bp, Artificial Sequence
  chemically synthesized
ctgagtttgaagaatcaaacac

SEQ ID NO: 35872 - DNA, 22 bp, Artificial Sequence
  chemically synthesized
tgagtttgaagaatcaaacacc

SEQ ID NO: 35873 - DNA, 22 bp, Artificial Sequence
  chemically synthesized
agtttgaagaatcaaacacctt

SEQ ID NO: 35874 - DNA, 22 bp, Artificial Sequence
  chemically synthesized
gaagaatcaaacaccttcctaa

SEQ ID NO: 35875 - DNA, 22 bp, Artificial Sequence
  chemically synthesized
aagaatcaaacaccttcctaat

SEQ ID NO: 35876 - DNA, 22 bp, Artificial Sequence
  chemically synthesized
cctaattggtaggaatcctgaa

SEQ ID NO: 35877 - DNA, 22 bp, Artificial Sequence
  chemically synthesized
ctaattggtaggaatcctgaaa

SEQ ID NO: 35878 - DNA, 22 bp, Artificial Sequence
  chemically synthesized
attggtaggaatcctgaaaaca

SEQ ID NO: 35879 - DNA, 22 bp, Artificial Sequence
  chemically synthesized
gtaggaatcctgaaaacactcc

SEQ ID NO: 35880 - DNA, 22 bp, Artificial Sequence
  chemically synthesized
aaaacactccacaccggagtaa

SEQ ID NO: 35881 - DNA, 22 bp, Artificial Sequence
  chemically synthesized
cacaccggagtaaaagactttg

SEQ ID NO: 35882 - DNA, 22 bp, Artificial Sequence
  chemically synthesized
tggttttttatctttatgcctg

SEQ ID NO: 35883 - DNA, 22 bp, Artificial Sequence
  chemically synthesized
ggttttttatctttatgcctga

SEQ ID NO: 35884 - DNA, 22 bp, Artificial Sequence
  chemically synthesized
gttttttatctttatgcctgac

SEQ ID NO: 35885 - DNA, 22 bp, Artificial Sequence
  chemically synthesized
tttatctttatgcctgactaaa

SEQ ID NO: 35886 - DNA, 22 bp, Artificial Sequence
  chemically synthesized
ttatctttatgcctgactaaaa

SEQ ID NO: 35887 - DNA, 22 bp, Artificial Sequence
  chemically synthesized
tatctttatgcctgactaaaag

SEQ ID NO: 35888 - DNA, 22 bp, Artificial Sequence
  chemically synthesized
atctttatgcctgactaaaagt

SEQ ID NO: 35889 - DNA, 22 bp, Artificial Sequence
  chemically synthesized
tctttatgcctgactaaaagtt

SEQ ID NO: 35890 - DNA, 22 bp, Artificial Sequence
  chemically synthesized
tatgcctgactaaaagttaact

SEQ ID NO: 35891 - DNA, 22 bp, Artificial Sequence
  chemically synthesized
atgcctgactaaaagttaactc

SEQ ID NO: 35892 - DNA, 22 bp, Artificial Sequence
  chemically synthesized
tgcctgactaaaagttaactct

SEQ ID NO: 35893 - DNA, 22 bp, Artificial Sequence
  chemically synthesized
actaaaagttaactctcattct

SEQ ID NO: 35894 - DNA, 22 bp, Artificial Sequence
  chemically synthesized
aaagttaactctcattctttca

SEQ ID NO: 35895 - DNA, 22 bp, Artificial Sequence
  chemically synthesized
actctcattctttcattcagca

SEQ ID NO: 35896 - DNA, 22 bp, Artificial Sequence
  chemically synthesized
tcattctttcattcagcaaata

SEQ ID NO: 35897 - DNA, 22 bp, Artificial Sequence
  chemically synthesized
attctttcattcagcaaatatt

SEQ ID NO: 35898 - DNA, 22 bp, Artificial Sequence
  chemically synthesized
tttcattcagcaaatattttgt

SEQ ID NO: 35899 - DNA, 22 bp, Artificial Sequence
  chemically synthesized
tcattcagcaaatattttgtgc

SEQ ID NO: 35900 - DNA, 22 bp, Artificial Sequence
  chemically synthesized
cattcagcaaatattttgtgct

SEQ ID NO: 35901 - DNA, 22 bp, Artificial Sequence
  chemically synthesized
attcagcaaatattttgtgcta

SEQ ID NO: 35902 - DNA, 22 bp, Artificial Sequence
  chemically synthesized
agcaaatattttgtgctagtgc

SEQ ID NO: 35903 - DNA, 22 bp, Artificial Sequence
  chemically synthesized
tgtgctagtgcatgacactgca

SEQ ID NO: 35904 - DNA, 22 bp, Artificial Sequence
  chemically synthesized
gtgctagtgcatgacactgcag

SEQ ID NO: 35905 - DNA, 22 bp, Artificial Sequence
  chemically synthesized
tgctagtgcatgacactgcaga

SEQ ID NO: 35906 - DNA, 22 bp, Artificial Sequence
  chemically synthesized
gtgcatgacactgcagattaat

SEQ ID NO: 35907 - DNA, 22 bp, Artificial Sequence
  chemically synthesized
cagattaatatcgtagatgaac

SEQ ID NO: 35908 - DNA, 22 bp, Artificial Sequence
  chemically synthesized
atatcgtagatgaactgagtct

SEQ ID NO: 35909 - DNA, 22 bp, Artificial Sequence
  chemically synthesized
agtctgggctaggtagagtcaa

SEQ ID NO: 35910 - DNA, 22 bp, Artificial Sequence
  chemically synthesized
ggctaggtagagtcaaaaaaaa

SEQ ID NO: 35911 - DNA, 22 bp, Artificial Sequence
  chemically synthesized
ggtagagtcaaaaaaaaatttc

SEQ ID NO: 35912 - DNA, 22 bp, Artificial Sequence
  chemically synthesized
cctaaaggagcctgtacctaaa

SEQ ID NO: 35913 - DNA, 22 bp, Artificial Sequence
  chemically synthesized
ctaaaggagcctgtacctaaac

SEQ ID NO: 35914 - DNA, 22 bp, Artificial Sequence
  chemically synthesized
aaggagcctgtacctaaactga

SEQ ID NO: 35915 - DNA, 22 bp, Artificial Sequence
  chemically synthesized
tacctaaactgagtcttcagag

SEQ ID NO: 35916 - DNA, 22 bp, Artificial Sequence
  chemically synthesized
aactgagtcttcagagagaagt

SEQ ID NO: 35917 - DNA, 22 bp, Artificial Sequence
  chemically synthesized
agtcttcagagagaagttggaa

SEQ ID NO: 35918 - DNA, 22 bp, Artificial Sequence
  chemically synthesized
cagagagaagttggaactggca

SEQ ID NO: 35919 - DNA, 22 bp, Artificial Sequence
  chemically synthesized
agagagaagttggaactggcaa

SEQ ID NO: 35920 - DNA, 22 bp, Artificial Sequence
  chemically synthesized
gaactggcaaagtgaggaagga

SEQ ID NO: 35921 - DNA, 22 bp, Artificial Sequence
  chemically synthesized
gcaaagtgaggaaggacggggt

SEQ ID NO: 35922 - DNA, 22 bp, Artificial Sequence
  chemically synthesized
gagggaagagtgagtgcaaagg

SEQ ID NO: 35923 - DNA, 22 bp, Artificial Sequence
  chemically synthesized
catgctctagaatccaaaactg

SEQ ID NO: 35924 - DNA, 22 bp, Artificial Sequence
  chemically synthesized
tagaatccaaaactgtgtcagc

SEQ ID NO: 35925 - DNA, 22 bp, Artificial Sequence
  chemically synthesized
gaatccaaaactgtgtcagcca

SEQ ID NO: 35926 - DNA, 22 bp, Artificial Sequence
  chemically synthesized
tgtcagccaaatttgagttgat

SEQ ID NO: 35927 - DNA, 22 bp, Artificial Sequence
  chemically synthesized
gagttgatggagggacagccaa

SEQ ID NO: 35928 - DNA, 22 bp, Artificial Sequence
  chemically synthesized
agttgatggagggacagccaaa

SEQ ID NO: 35929 - DNA, 22 bp, Artificial Sequence
  chemically synthesized
atggagggacagccaaactgag

SEQ ID NO: 35930 - DNA, 22 bp, Artificial Sequence
  chemically synthesized
agatacccaggcggtggttgga

SEQ ID NO: 35931 - DNA, 22 bp, Artificial Sequence
  chemically synthesized
gatttatggatctggatttcag

SEQ ID NO: 35932 - DNA, 22 bp, Artificial Sequence
  chemically synthesized
atggatctggatttcaggggag

SEQ ID NO: 35933 - DNA, 22 bp, Artificial Sequence
  chemically synthesized
tggatctggatttcaggggagt

SEQ ID NO: 35934 - DNA, 22 bp, Artificial Sequence
  chemically synthesized
gatttcaggggagtgggcaggg

SEQ ID NO: 35935 - DNA, 22 bp, Artificial Sequence
  chemically synthesized
caggggagtgggcagggctagg

SEQ ID NO: 35936 - DNA, 22 bp, Artificial Sequence
  chemically synthesized
aggggagtgggcagggctaggg

SEQ ID NO: 35937 - DNA, 22 bp, Artificial Sequence
  chemically synthesized
ggggaatagaactgagggtcat

SEQ ID NO: 35938 - DNA, 22 bp, Artificial Sequence
  chemically synthesized
agggtcatgatgtcagtggtag

SEQ ID NO: 35939 - DNA, 22 bp, Artificial Sequence
  chemically synthesized
aagtcttggaagaaagagtaga

SEQ ID NO: 35940 - DNA, 22 bp, Artificial Sequence
  chemically synthesized
ggaagaaagagtagatagaaac

SEQ ID NO: 35941 - DNA, 22 bp, Artificial Sequence
  chemically synthesized
gaagaaagagtagatagaaact

SEQ ID NO: 35942 - DNA, 22 bp, Artificial Sequence
  chemically synthesized
tgttttctgatgaacattctat

SEQ ID NO: 35943 - DNA, 22 bp, Artificial Sequence
  chemically synthesized
gttttctgatgaacattctatg

SEQ ID NO: 35944 - DNA, 22 bp, Artificial Sequence
  chemically synthesized
ttttctgatgaacattctatga

SEQ ID NO: 35945 - DNA, 22 bp, Artificial Sequence
  chemically synthesized
tctgatgaacattctatgagga

SEQ ID NO: 35946 - DNA, 22 bp, Artificial Sequence
  chemically synthesized
ctgatgaacattctatgaggaa

SEQ ID NO: 35947 - DNA, 22 bp, Artificial Sequence
  chemically synthesized
tgatgaacattctatgaggaag

SEQ ID NO: 35948 - DNA, 22 bp, Artificial Sequence
  chemically synthesized
atgaacattctatgaggaagtt

SEQ ID NO: 35949 - DNA, 22 bp, Artificial Sequence
  chemically synthesized
tatgaggaagttcagcagaggt

SEQ ID NO: 35950 - DNA, 22 bp, Artificial Sequence
  chemically synthesized
tgaggaagttcagcagaggttg

SEQ ID NO: 35951 - DNA, 22 bp, Artificial Sequence
  chemically synthesized
agcagaggttggaaacatcttt

SEQ ID NO: 35952 - DNA, 22 bp, Artificial Sequence
  chemically synthesized
gaaacatctttaccatttataa

SEQ ID NO: 35953 - DNA, 22 bp, Artificial Sequence
  chemically synthesized
taccatttataaataaatttta

SEQ ID NO: 35954 - DNA, 22 bp, Artificial Sequence
  chemically synthesized
accatttataaataaattttat

SEQ ID NO: 35955 - DNA, 22 bp, Artificial Sequence
  chemically synthesized
ccatttataaataaattttatg

SEQ ID NO: 35956 - DNA, 22 bp, Artificial Sequence
  chemically synthesized
ataaataaattttatgtaaaat

SEQ ID NO: 35957 - DNA, 22 bp, Artificial Sequence
  chemically synthesized
taaataaattttatgtaaaatc

SEQ ID NO: 35958 - DNA, 22 bp, Artificial Sequence
  chemically synthesized
tatgtaaaatcctatcctgctg

SEQ ID NO: 35959 - DNA, 22 bp, Artificial Sequence
  chemically synthesized
atgtaaaatcctatcctgctgt

SEQ ID NO: 35960 - DNA, 22 bp, Artificial Sequence
  chemically synthesized
tgtaaaatcctatcctgctgtc

SEQ ID NO: 35961 - DNA, 22 bp, Artificial Sequence
  chemically synthesized
tcctgctgtcatgtttaagcaa

SEQ ID NO: 35962 - DNA, 22 bp, Artificial Sequence
  chemically synthesized
ctgtcatgtttaagcaacttat

SEQ ID NO: 35963 - DNA, 22 bp, Artificial Sequence
  chemically synthesized
tcatgtttaagcaacttattat

SEQ ID NO: 35964 - DNA, 22 bp, Artificial Sequence
  chemically synthesized
aagcaacttattatgcacagca

SEQ ID NO: 35965 - DNA, 22 bp, Artificial Sequence
  chemically synthesized
agcaacttattatgcacagcac

SEQ ID NO: 35966 - DNA, 22 bp, Artificial Sequence
  chemically synthesized
attatgcacagcaccaggacat

SEQ ID NO: 35967 - DNA, 22 bp, Artificial Sequence
  chemically synthesized
ttatgcacagcaccaggacatc

SEQ ID NO: 35968 - DNA, 22 bp, Artificial Sequence
  chemically synthesized
tgcacagcaccaggacatcaat

SEQ ID NO: 35969 - DNA, 22 bp, Artificial Sequence
  chemically synthesized
catgccagtctttgctctcagt

SEQ ID NO: 35970 - DNA, 22 bp, Artificial Sequence
  chemically synthesized
tgctctcagtttcaaaggcatt

SEQ ID NO: 35971 - DNA, 22 bp, Artificial Sequence
  chemically synthesized
gctctcagtttcaaaggcattc

SEQ ID NO: 35972 - DNA, 22 bp, Artificial Sequence
  chemically synthesized
ctctcagtttcaaaggcattct

SEQ ID NO: 35973 - DNA, 22 bp, Artificial Sequence
  chemically synthesized
tcagtttcaaaggcattcttcc

SEQ ID NO: 35974 - DNA, 22 bp, Artificial Sequence
  chemically synthesized
agtttcaaaggcattcttccct

SEQ ID NO: 35975 - DNA, 22 bp, Artificial Sequence
  chemically synthesized
caaaggcattcttccctgcctg

SEQ ID NO: 35976 - DNA, 22 bp, Artificial Sequence
  chemically synthesized
aaaggcattcttccctgcctgc

SEQ ID NO: 35977 - DNA, 22 bp, Artificial Sequence
  chemically synthesized
ttccctgcctgctgtctaatct

SEQ ID NO: 35978 - DNA, 22 bp, Artificial Sequence
  chemically synthesized
ccctgcctgctgtctaatcttt

SEQ ID NO: 35979 - DNA, 22 bp, Artificial Sequence
  chemically synthesized
cctgcctgctgtctaatcttta

SEQ ID NO: 35980 - DNA, 22 bp, Artificial Sequence
  chemically synthesized
cctgctgtctaatctttacaaa

SEQ ID NO: 35981 - DNA, 22 bp, Artificial Sequence
  chemically synthesized
ctgtctaatctttacaaagaaa

SEQ ID NO: 35982 - DNA, 22 bp, Artificial Sequence
  chemically synthesized
tctaatctttacaaagaaaggt

SEQ ID NO: 35983 - DNA, 22 bp, Artificial Sequence
  chemically synthesized
atctttacaaagaaaggttaac

SEQ ID NO: 35984 - DNA, 22 bp, Artificial Sequence
  chemically synthesized
tacaaagaaaggttaactccag

SEQ ID NO: 35985 - DNA, 22 bp, Artificial Sequence
  chemically synthesized
acaaagaaaggttaactccaga

SEQ ID NO: 35986 - DNA, 22 bp, Artificial Sequence
  chemically synthesized
caaagaaaggttaactccagag

SEQ ID NO: 35987 - DNA, 22 bp, Artificial Sequence
  chemically synthesized
actccagaggtcaggaatctga

SEQ ID NO: 35988 - DNA, 22 bp, Artificial Sequence
  chemically synthesized
cagaggtcaggaatctgaacac

SEQ ID NO: 35989 - DNA, 22 bp, Artificial Sequence
  chemically synthesized
aacacagaaaaccagattgcat

SEQ ID NO: 35990 - DNA, 22 bp, Artificial Sequence
  chemically synthesized
catcatattcattctaatcaat

SEQ ID NO: 35991 - DNA, 22 bp, Artificial Sequence
  chemically synthesized
attctaatcaataaacattata

SEQ ID NO: 35992 - DNA, 22 bp, Artificial Sequence
  chemically synthesized
taatcaataaacattatataat

SEQ ID NO: 35993 - DNA, 22 bp, Artificial Sequence
  chemically synthesized
atcaataaacattatataattt

SEQ ID NO: 35994 - DNA, 22 bp, Artificial Sequence
  chemically synthesized
tataatttttaaaactgtttct

SEQ ID NO: 35995 - DNA, 22 bp, Artificial Sequence
  chemically synthesized
ttaaaactgtttctcatctttt

SEQ ID NO: 35996 - DNA, 22 bp, Artificial Sequence
  chemically synthesized
taaaactgtttctcatctttta

SEQ ID NO: 35997 - DNA, 22 bp, Artificial Sequence
  chemically synthesized
aaaactgtttctcatcttttat

SEQ ID NO: 35998 - DNA, 22 bp, Artificial Sequence
  chemically synthesized
aaactgtttctcatcttttatt

SEQ ID NO: 35999 - DNA, 22 bp, Artificial Sequence
  chemically synthesized
tttctcatcttttatttcttca

SEQ ID NO: 36000 - DNA, 22 bp, Artificial Sequence
  chemically synthesized
ctcatcttttatttcttcattt

SEQ ID NO: 36001 - DNA, 22 bp, Artificial Sequence
  chemically synthesized
tcatcttttatttcttcatttt

SEQ ID NO: 36002 - DNA, 22 bp, Artificial Sequence
  chemically synthesized
atcttttatttcttcattttaa

SEQ ID NO: 36003 - DNA, 22 bp, Artificial Sequence
  chemically synthesized
ttatttcttcattttaatgaat

SEQ ID NO: 36004 - DNA, 22 bp, Artificial Sequence
  chemically synthesized
tatttcttcattttaatgaata

SEQ ID NO: 36005 - DNA, 22 bp, Artificial Sequence
  chemically synthesized
atttcttcattttaatgaatat

SEQ ID NO: 36006 - DNA, 22 bp, Artificial Sequence
  chemically synthesized
tttcttcattttaatgaatatg

SEQ ID NO: 36007 - DNA, 22 bp, Artificial Sequence
  chemically synthesized
cttcattttaatgaatatgtca

SEQ ID NO: 36008 - DNA, 22 bp, Artificial Sequence
  chemically synthesized
ttcattttaatgaatatgtcaa

SEQ ID NO: 36009 - DNA, 22 bp, Artificial Sequence
  chemically synthesized
cattttaatgaatatgtcaaca

SEQ ID NO: 36010 - DNA, 22 bp, Artificial Sequence
  chemically synthesized
attttaatgaatatgtcaacac

SEQ ID NO: 36011 - DNA, 22 bp, Artificial Sequence
  chemically synthesized
taatgaatatgtcaacacaaag

SEQ ID NO: 36012 - DNA, 22 bp, Artificial Sequence
  chemically synthesized
aatgaatatgtcaacacaaagc

SEQ ID NO: 36013 - DNA, 22 bp, Artificial Sequence
  chemically synthesized
atgaatatgtcaacacaaagcc

SEQ ID NO: 36014 - DNA, 22 bp, Artificial Sequence
  chemically synthesized
acacaaaagtacaactggggta

SEQ ID NO: 36015 - DNA, 22 bp, Artificial Sequence
  chemically synthesized
cacaaaagtacaactggggtaa

SEQ ID NO: 36016 - DNA, 22 bp, Artificial Sequence
  chemically synthesized
gggtaagaaaattcaaaagata

SEQ ID NO: 36017 - DNA, 22 bp, Artificial Sequence
  chemically synthesized
aaaagataaagtaataaaatta

SEQ ID NO: 36018 - DNA, 22 bp, Artificial Sequence
  chemically synthesized
aatttaaaatgaaataccctat

SEQ ID NO: 36019 - DNA, 22 bp, Artificial Sequence
  chemically synthesized
aaaatgaaataccctatgtatt

SEQ ID NO: 36020 - DNA, 22 bp, Artificial Sequence
  chemically synthesized
aaatgaaataccctatgtattt

SEQ ID NO: 36021 - DNA, 22 bp, Artificial Sequence
  chemically synthesized
tgtatttgagtaagttgcttag

SEQ ID NO: 36022 - DNA, 22 bp, Artificial Sequence
  chemically synthesized
gagtaagttgcttagcttctcc

SEQ ID NO: 36023 - DNA, 22 bp, Artificial Sequence
  chemically synthesized
agtaagttgcttagcttctccc

SEQ ID NO: 36024 - DNA, 22 bp, Artificial Sequence
  chemically synthesized
cttagcttctcccaaccttggt

SEQ ID NO: 36025 - DNA, 22 bp, Artificial Sequence
  chemically synthesized
agcttctcccaaccttggtttc

SEQ ID NO: 36026 - DNA, 22 bp, Artificial Sequence
  chemically synthesized
gcttctcccaaccttggtttcc

SEQ ID NO: 36027 - DNA, 22 bp, Artificial Sequence
  chemically synthesized
ctcccaaccttggtttcctcat

SEQ ID NO: 36028 - DNA, 22 bp, Artificial Sequence
  chemically synthesized
tcccaaccttggtttcctcatt

SEQ ID NO: 36029 - DNA, 22 bp, Artificial Sequence
  chemically synthesized
ccaaccttggtttcctcatttc

SEQ ID NO: 36030 - DNA, 22 bp, Artificial Sequence
  chemically synthesized
ggtttcctcatttctaaaacga

SEQ ID NO: 36031 - DNA, 22 bp, Artificial Sequence
  chemically synthesized
gtttcctcatttctaaaacgaa

SEQ ID NO: 36032 - DNA, 22 bp, Artificial Sequence
  chemically synthesized
cctcatttctaaaacgaagaac

SEQ ID NO: 36033 - DNA, 22 bp, Artificial Sequence
  chemically synthesized
ctcatttctaaaacgaagaact

SEQ ID NO: 36034 - DNA, 22 bp, Artificial Sequence
  chemically synthesized
atttctaaaacgaagaacttgc

SEQ ID NO: 36035 - DNA, 22 bp, Artificial Sequence
  chemically synthesized
ctaaaacgaagaacttgcttaa

SEQ ID NO: 36036 - DNA, 22 bp, Artificial Sequence
  chemically synthesized
taaaacgaagaacttgcttaat

SEQ ID NO: 36037 - DNA, 22 bp, Artificial Sequence
  chemically synthesized
aaacgaagaacttgcttaatat

SEQ ID NO: 36038 - DNA, 22 bp, Artificial Sequence
  chemically synthesized
gcttaatattcaggctctgggc

SEQ ID NO: 36039 - DNA, 22 bp, Artificial Sequence
  chemically synthesized
cttaatattcaggctctgggcc

SEQ ID NO: 36040 - DNA, 22 bp, Artificial Sequence
  chemically synthesized
aatattcaggctctgggcccca

SEQ ID NO: 36041 - DNA, 22 bp, Artificial Sequence
  chemically synthesized
atattcaggctctgggccccac

SEQ ID NO: 36042 - DNA, 22 bp, Artificial Sequence
  chemically synthesized
aggctctgggccccaccaccaa

SEQ ID NO: 36043 - DNA, 22 bp, Artificial Sequence
  chemically synthesized
tgggccccaccaccaaatcctt

SEQ ID NO: 36044 - DNA, 22 bp, Artificial Sequence
  chemically synthesized
ggccccaccaccaaatccttga

SEQ ID NO: 36045 - DNA, 22 bp, Artificial Sequence
  chemically synthesized
gattcactggctctgggtctgt

SEQ ID NO: 36046 - DNA, 22 bp, Artificial Sequence
  chemically synthesized
attcactggctctgggtctgta

SEQ ID NO: 36047 - DNA, 22 bp, Artificial Sequence
  chemically synthesized
actggctctgggtctgtatgta

SEQ ID NO: 36048 - DNA, 22 bp, Artificial Sequence
  chemically synthesized
gctctgggtctgtatgtaacaa

SEQ ID NO: 36049 - DNA, 22 bp, Artificial Sequence
  chemically synthesized
tgggtctgtatgtaacaagctt

SEQ ID NO: 36050 - DNA, 22 bp, Artificial Sequence
  chemically synthesized
ggtctgtatgtaacaagcttct

SEQ ID NO: 36051 - DNA, 22 bp, Artificial Sequence
  chemically synthesized
tatgtaacaagcttctggagtg

SEQ ID NO: 36052 - DNA, 22 bp, Artificial Sequence
  chemically synthesized
ctggagtgattctaatgattag

SEQ ID NO: 36053 - DNA, 22 bp, Artificial Sequence
  chemically synthesized
tggagtgattctaatgattagc

SEQ ID NO: 36054 - DNA, 22 bp, Artificial Sequence
  chemically synthesized
gagtgattctaatgattagcca

SEQ ID NO: 36055 - DNA, 22 bp, Artificial Sequence
  chemically synthesized
taatgattagccagagacagga

SEQ ID NO: 36056 - DNA, 22 bp, Artificial Sequence
  chemically synthesized
atgattagccagagacaggacc

SEQ ID NO: 36057 - DNA, 22 bp, Artificial Sequence
  chemically synthesized
gccagagacaggacctactatt

SEQ ID NO: 36058 - DNA, 22 bp, Artificial Sequence
  chemically synthesized
ctattctacgtaactgatttcc

SEQ ID NO: 36059 - DNA, 22 bp, Artificial Sequence
  chemically synthesized
ttctacgtaactgatttcctct

SEQ ID NO: 36060 - DNA, 22 bp, Artificial Sequence
  chemically synthesized
tacgtaactgatttcctcttgc

SEQ ID NO: 36061 - DNA, 22 bp, Artificial Sequence
  chemically synthesized
cgtaactgatttcctcttgctg

SEQ ID NO: 36062 - DNA, 22 bp, Artificial Sequence
  chemically synthesized
atttcctcttgctgctgtaaaa

SEQ ID NO: 36063 - DNA, 22 bp, Artificial Sequence
  chemically synthesized
cctcttgctgctgtaaaaaatt

SEQ ID NO: 36064 - DNA, 22 bp, Artificial Sequence
  chemically synthesized
ctcttgctgctgtaaaaaatta

SEQ ID NO: 36065 - DNA, 22 bp, Artificial Sequence
  chemically synthesized
ttgctgctgtaaaaaattacca

SEQ ID NO: 36066 - DNA, 22 bp, Artificial Sequence
  chemically synthesized
gctgctgtaaaaaattaccaca

SEQ ID NO: 36067 - DNA, 22 bp, Artificial Sequence
  chemically synthesized
ctgctgtaaaaaattaccacaa

SEQ ID NO: 36068 - DNA, 22 bp, Artificial Sequence
  chemically synthesized
ctgtaaaaaattaccacaaatt

SEQ ID NO: 36069 - DNA, 22 bp, Artificial Sequence
  chemically synthesized
taaaaaattaccacaaatttat

SEQ ID NO: 36070 - DNA, 22 bp, Artificial Sequence
  chemically synthesized
ccacaaatttattggcttaaaa

SEQ ID NO: 36071 - DNA, 22 bp, Artificial Sequence
  chemically synthesized
attggcttaaaacaacacaaat

SEQ ID NO: 36072 - DNA, 22 bp, Artificial Sequence
  chemically synthesized
ttggcttaaaacaacacaaatg

SEQ ID NO: 36073 - DNA, 22 bp, Artificial Sequence
  chemically synthesized
gcttaaaacaacacaaatgtat

SEQ ID NO: 36074 - DNA, 22 bp, Artificial Sequence
  chemically synthesized
aaaacaacacaaatgtattatc

SEQ ID NO: 36075 - DNA, 22 bp, Artificial Sequence
  chemically synthesized
aaacaacacaaatgtattatct

SEQ ID NO: 36076 - DNA, 22 bp, Artificial Sequence
  chemically synthesized
tcttgaagttgtggaggtcaga

SEQ ID NO: 36077 - DNA, 22 bp, Artificial Sequence
  chemically synthesized
gaagttgtggaggtcagaagtc

SEQ ID NO: 36078 - DNA, 22 bp, Artificial Sequence
  chemically synthesized
aagttgtggaggtcagaagtct

SEQ ID NO: 36079 - DNA, 22 bp, Artificial Sequence
  chemically synthesized
tggaggtcagaagtctgaaatc

SEQ ID NO: 36080 - DNA, 22 bp, Artificial Sequence
  chemically synthesized
aaatcggtttcactgggctaaa

SEQ ID NO: 36081 - DNA, 22 bp, Artificial Sequence
  chemically synthesized
cactgggctaaagtcgaggtgt

SEQ ID NO: 36082 - DNA, 22 bp, Artificial Sequence
  chemically synthesized
actgggctaaagtcgaggtgtc

SEQ ID NO: 36083 - DNA, 22 bp, Artificial Sequence
  chemically synthesized
ggctaaagtcgaggtgtcagtg

SEQ ID NO: 36084 - DNA, 22 bp, Artificial Sequence
  chemically synthesized
aagtcgaggtgtcagtgtggct

SEQ ID NO: 36085 - DNA, 22 bp, Artificial Sequence
  chemically synthesized
tttcttctggagactctatgag

SEQ ID NO: 36086 - DNA, 22 bp, Artificial Sequence
  chemically synthesized
cttctggagactctatgagaga

SEQ ID NO: 36087 - DNA, 22 bp, Artificial Sequence
  chemically synthesized
ttctggagactctatgagagat

SEQ ID NO: 36088 - DNA, 22 bp, Artificial Sequence
  chemically synthesized
ctggagactctatgagagattg

SEQ ID NO: 36089 - DNA, 22 bp, Artificial Sequence
  chemically synthesized
tggagactctatgagagattgt

SEQ ID NO: 36090 - DNA, 22 bp, Artificial Sequence
  chemically synthesized
gagactctatgagagattgtgt

SEQ ID NO: 36091 - DNA, 22 bp, Artificial Sequence
  chemically synthesized
tatgagagattgtgttttcctg

SEQ ID NO: 36092 - DNA, 22 bp, Artificial Sequence
  chemically synthesized
tgagagattgtgttttcctgcc

SEQ ID NO: 36093 - DNA, 22 bp, Artificial Sequence
  chemically synthesized
tgttttcctgccttttccatgg

SEQ ID NO: 36094 - DNA, 22 bp, Artificial Sequence
  chemically synthesized
tcctgccttttccatggattct

SEQ ID NO: 36095 - DNA, 22 bp, Artificial Sequence
  chemically synthesized
cctgccttttccatggattctg

SEQ ID NO: 36096 - DNA, 22 bp, Artificial Sequence
  chemically synthesized
ctgccttttccatggattctgt

SEQ ID NO: 36097 - DNA, 22 bp, Artificial Sequence
  chemically synthesized
ccttttccatggattctgtttc

SEQ ID NO: 36098 - DNA, 22 bp, Artificial Sequence
  chemically synthesized
ttccatggattctgtttcctct

SEQ ID NO: 36099 - DNA, 22 bp, Artificial Sequence
  chemically synthesized
tccatggattctgtttcctctt

SEQ ID NO: 36100 - DNA, 22 bp, Artificial Sequence
  chemically synthesized
ccatggattctgtttcctcttc

SEQ ID NO: 36101 - DNA, 22 bp, Artificial Sequence
  chemically synthesized
catggattctgtttcctcttct

SEQ ID NO: 36102 - DNA, 22 bp, Artificial Sequence
  chemically synthesized
tgtttcctcttctagaggctac

SEQ ID NO: 36103 - DNA, 22 bp, Artificial Sequence
  chemically synthesized
tttcctcttctagaggctaccc

SEQ ID NO: 36104 - DNA, 22 bp, Artificial Sequence
  chemically synthesized
cctcttctagaggctacccaca

SEQ ID NO: 36105 - DNA, 22 bp, Artificial Sequence
  chemically synthesized
ctcttctagaggctacccacat

SEQ ID NO: 36106 - DNA, 22 bp, Artificial Sequence
  chemically synthesized
ttctagaggctacccacattcc

SEQ ID NO: 36107 - DNA, 22 bp, Artificial Sequence
  chemically synthesized
ctagaggctacccacattcctt

SEQ ID NO: 36108 - DNA, 22 bp, Artificial Sequence
  chemically synthesized
tagaggctacccacattccttg

SEQ ID NO: 36109 - DNA, 22 bp, Artificial Sequence
  chemically synthesized
gaggctacccacattccttggt

SEQ ID NO: 36110 - DNA, 22 bp, Artificial Sequence
  chemically synthesized
cccacattccttggtttgtagc

SEQ ID NO: 36111 - DNA, 22 bp, Artificial Sequence
  chemically synthesized
cttggtttgtagcctcttcctc

SEQ ID NO: 36112 - DNA, 22 bp, Artificial Sequence
  chemically synthesized
ggtttgtagcctcttcctcgat

SEQ ID NO: 36113 - DNA, 22 bp, Artificial Sequence
  chemically synthesized
gtttgtagcctcttcctcgatc

SEQ ID NO: 36114 - DNA, 22 bp, Artificial Sequence
  chemically synthesized
gtagcctcttcctcgatcttca

SEQ ID NO: 36115 - DNA, 22 bp, Artificial Sequence
  chemically synthesized
tagcctcttcctcgatcttcaa

SEQ ID NO: 36116 - DNA, 22 bp, Artificial Sequence
  chemically synthesized
ttcctcgatcttcaaaaaaatg

SEQ ID NO: 36117 - DNA, 22 bp, Artificial Sequence
  chemically synthesized
cctcgatcttcaaaaaaatgta

SEQ ID NO: 36118 - DNA, 22 bp, Artificial Sequence
  chemically synthesized
ctcgatcttcaaaaaaatgtat

SEQ ID NO: 36119 - DNA, 22 bp, Artificial Sequence
  chemically synthesized
gatcttcaaaaaaatgtatctc

SEQ ID NO: 36120 - DNA, 22 bp, Artificial Sequence
  chemically synthesized
caaaaaaatgtatctctgcttt

SEQ ID NO: 36121 - DNA, 22 bp, Artificial Sequence
  chemically synthesized
aaaaaaatgtatctctgctttt

SEQ ID NO: 36122 - DNA, 22 bp, Artificial Sequence
  chemically synthesized
tgcttttgtaatcacgtcacat

SEQ ID NO: 36123 - DNA, 22 bp, Artificial Sequence
  chemically synthesized
cttttgtaatcacgtcacattt

SEQ ID NO: 36124 - DNA, 22 bp, Artificial Sequence
  chemically synthesized
ttgtaatcacgtcacattttct

SEQ ID NO: 36125 - DNA, 22 bp, Artificial Sequence
  chemically synthesized
tgtaatcacgtcacattttctc

SEQ ID NO: 36126 - DNA, 22 bp, Artificial Sequence
  chemically synthesized
gtaatcacgtcacattttctcc

SEQ ID NO: 36127 - DNA, 22 bp, Artificial Sequence
  chemically synthesized
taatcacgtcacattttctcct

SEQ ID NO: 36128 - DNA, 22 bp, Artificial Sequence
  chemically synthesized
tctcctcttataagtcaaatct

SEQ ID NO: 36129 - DNA, 22 bp, Artificial Sequence
  chemically synthesized
ctcctcttataagtcaaatctc

SEQ ID NO: 36130 - DNA, 22 bp, Artificial Sequence
  chemically synthesized
tcctcttataagtcaaatctcc

SEQ ID NO: 36131 - DNA, 22 bp, Artificial Sequence
  chemically synthesized
ctcttataagtcaaatctccct

SEQ ID NO: 36132 - DNA, 22 bp, Artificial Sequence
  chemically synthesized
ttataagtcaaatctccctttg

SEQ ID NO: 36133 - DNA, 22 bp, Artificial Sequence
  chemically synthesized
ataagtcaaatctccctttgcc

SEQ ID NO: 36134 - DNA, 22 bp, Artificial Sequence
  chemically synthesized
taagtcaaatctccctttgcct

SEQ ID NO: 36135 - DNA, 22 bp, Artificial Sequence
  chemically synthesized
cctttgcctccctcttataatg

SEQ ID NO: 36136 - DNA, 22 bp, Artificial Sequence
  chemically synthesized
tgcctccctcttataatgacac

SEQ ID NO: 36137 - DNA, 22 bp, Artificial Sequence
  chemically synthesized
gcctccctcttataatgacact

SEQ ID NO: 36138 - DNA, 22 bp, Artificial Sequence
  chemically synthesized
cctccctcttataatgacactt

SEQ ID NO: 36139 - DNA, 22 bp, Artificial Sequence
  chemically synthesized
cctcttataatgacacttgtga

SEQ ID NO: 36140 - DNA, 22 bp, Artificial Sequence
  chemically synthesized
ttataatgacacttgtgattac

SEQ ID NO: 36141 - DNA, 22 bp, Artificial Sequence
  chemically synthesized
ataatgacacttgtgattacat

SEQ ID NO: 36142 - DNA, 22 bp, Artificial Sequence
  chemically synthesized
taatgacacttgtgattacatt

SEQ ID NO: 36143 - DNA, 22 bp, Artificial Sequence
  chemically synthesized
gtgattacatttaggatacacc

SEQ ID NO: 36144 - DNA, 22 bp, Artificial Sequence
  chemically synthesized
tgattacatttaggatacaccc

SEQ ID NO: 36145 - DNA, 22 bp, Artificial Sequence
  chemically synthesized
catttaggatacacccaaataa

SEQ ID NO: 36146 - DNA, 22 bp, Artificial Sequence
  chemically synthesized
aggatacacccaaataattagg

SEQ ID NO: 36147 - DNA, 22 bp, Artificial Sequence
  chemically synthesized
ggatacacccaaataattagga

SEQ ID NO: 36148 - DNA, 22 bp, Artificial Sequence
  chemically synthesized
ggatatctccccatcccaagat

SEQ ID NO: 36149 - DNA, 22 bp, Artificial Sequence
  chemically synthesized
cccatcccaagatccttaatta

SEQ ID NO: 36150 - DNA, 22 bp, Artificial Sequence
  chemically synthesized
aattatatatgcaaaagtctgt

SEQ ID NO: 36151 - DNA, 22 bp, Artificial Sequence
  chemically synthesized
attatatatgcaaaagtctgtt

SEQ ID NO: 36152 - DNA, 22 bp, Artificial Sequence
  chemically synthesized
tatatgcaaaagtctgtttggc

SEQ ID NO: 36153 - DNA, 22 bp, Artificial Sequence
  chemically synthesized
tttggctagaaaagataatact

SEQ ID NO: 36154 - DNA, 22 bp, Artificial Sequence
  chemically synthesized
ggctagaaaagataatactcac

SEQ ID NO: 36155 - DNA, 22 bp, Artificial Sequence
  chemically synthesized
gctagaaaagataatactcaca

SEQ ID NO: 36156 - DNA, 22 bp, Artificial Sequence
  chemically synthesized
gaaaagataatactcacaggtt

SEQ ID NO: 36157 - DNA, 22 bp, Artificial Sequence
  chemically synthesized
acaggtttcaggggttaagcca

SEQ ID NO: 36158 - DNA, 22 bp, Artificial Sequence
  chemically synthesized
caggggttaagccatacatatc

SEQ ID NO: 36159 - DNA, 22 bp, Artificial Sequence
  chemically synthesized
aggggttaagccatacatatct

SEQ ID NO: 36160 - DNA, 22 bp, Artificial Sequence
  chemically synthesized
agccatacatatctttcagagt

SEQ ID NO: 36161 - DNA, 22 bp, Artificial Sequence
  chemically synthesized
tcagagtgagccattagccatt

SEQ ID NO: 36162 - DNA, 22 bp, Artificial Sequence
  chemically synthesized
cagagtgagccattagccatta

SEQ ID NO: 36163 - DNA, 22 bp, Artificial Sequence
  chemically synthesized
agagtgagccattagccattat

SEQ ID NO: 36164 - DNA, 22 bp, Artificial Sequence
  chemically synthesized
gccattattcagcctactgcga

SEQ ID NO: 36165 - DNA, 22 bp, Artificial Sequence
  chemically synthesized
ttcagcctactgcgataatgtg

SEQ ID NO: 36166 - DNA, 22 bp, Artificial Sequence
  chemically synthesized
agcctactgcgataatgtgcaa

SEQ ID NO: 36167 - DNA, 22 bp, Artificial Sequence
  chemically synthesized
ctgcgataatgtgcaagttccc

SEQ ID NO: 36168 - DNA, 22 bp, Artificial Sequence
  chemically synthesized
cgataatgtgcaagttcccttt

SEQ ID NO: 36169 - DNA, 22 bp, Artificial Sequence
  chemically synthesized
cctttacaatctatgttctatg

SEQ ID NO: 36170 - DNA, 22 bp, Artificial Sequence
  chemically synthesized
tacaatctatgttctatgttcc

SEQ ID NO: 36171 - DNA, 22 bp, Artificial Sequence
  chemically synthesized
acaatctatgttctatgttccc

SEQ ID NO: 36172 - DNA, 22 bp, Artificial Sequence
  chemically synthesized
caatctatgttctatgttccca

SEQ ID NO: 36173 - DNA, 22 bp, Artificial Sequence
  chemically synthesized
tgttctatgttcccatcaaggt

SEQ ID NO: 36174 - DNA, 22 bp, Artificial Sequence
  chemically synthesized
tatgttcccatcaaggttaatt

SEQ ID NO: 36175 - DNA, 22 bp, Artificial Sequence
  chemically synthesized
tgttcccatcaaggttaattag

SEQ ID NO: 36176 - DNA, 22 bp, Artificial Sequence
  chemically synthesized
ccatcaaggttaattagaaata

SEQ ID NO: 36177 - DNA, 22 bp, Artificial Sequence
  chemically synthesized
attagaaatattagactctttt

SEQ ID NO: 36178 - DNA, 22 bp, Artificial Sequence
  chemically synthesized
gaaatattagactctttttcca

SEQ ID NO: 36179 - DNA, 22 bp, Artificial Sequence
  chemically synthesized
gactctttttccacagaaaaaa

SEQ ID NO: 36180 - DNA, 22 bp, Artificial Sequence
  chemically synthesized
tttttccacagaaaaaaaaaat

SEQ ID NO: 36181 - DNA, 22 bp, Artificial Sequence
  chemically synthesized
tttccacagaaaaaaaaaatgt

SEQ ID NO: 36182 - DNA, 22 bp, Artificial Sequence
  chemically synthesized
ttccacagaaaaaaaaaatgta

SEQ ID NO: 36183 - DNA, 22 bp, Artificial Sequence
  chemically synthesized
tccacagaaaaaaaaaatgtag

SEQ ID NO: 36184 - DNA, 22 bp, Artificial Sequence
  chemically synthesized
ccacagaaaaaaaaaatgtagc

SEQ ID NO: 36185 - DNA, 22 bp, Artificial Sequence
  chemically synthesized
cacagaaaaaaaaaatgtagca

SEQ ID NO: 36186 - DNA, 22 bp, Artificial Sequence
  chemically synthesized
catctctaccctgacttctctc

SEQ ID NO: 36187 - DNA, 22 bp, Artificial Sequence
  chemically synthesized
atctctaccctgacttctctct

SEQ ID NO: 36188 - DNA, 22 bp, Artificial Sequence
  chemically synthesized
taccctgacttctctctctttc

SEQ ID NO: 36189 - DNA, 22 bp, Artificial Sequence
  chemically synthesized
ccctgacttctctctctttcct

SEQ ID NO: 36190 - DNA, 22 bp, Artificial Sequence
  chemically synthesized
acttctctctctttccttcatg

SEQ ID NO: 36191 - DNA, 22 bp, Artificial Sequence
  chemically synthesized
ctctctctttccttcatgccca

SEQ ID NO: 36192 - DNA, 22 bp, Artificial Sequence
  chemically synthesized
tctctctttccttcatgcccag

SEQ ID NO: 36193 - DNA, 22 bp, Artificial Sequence
  chemically synthesized
tctctttccttcatgcccagta

SEQ ID NO: 36194 - DNA, 22 bp, Artificial Sequence
  chemically synthesized
tctttccttcatgcccagtaag

SEQ ID NO: 36195 - DNA, 22 bp, Artificial Sequence
  chemically synthesized
tttccttcatgcccagtaagag

SEQ ID NO: 36196 - DNA, 22 bp, Artificial Sequence
  chemically synthesized
tccttcatgcccagtaagagga

SEQ ID NO: 36197 - DNA, 22 bp, Artificial Sequence
  chemically synthesized
ccttcatgcccagtaagaggaa

SEQ ID NO: 36198 - DNA, 22 bp, Artificial Sequence
  chemically synthesized
cttcatgcccagtaagaggaag

SEQ ID NO: 36199 - DNA, 22 bp, Artificial Sequence
  chemically synthesized
catgcccagtaagaggaagtga

SEQ ID NO: 36200 - DNA, 22 bp, Artificial Sequence
  chemically synthesized
atgcccagtaagaggaagtgag

SEQ ID NO: 36201 - DNA, 22 bp, Artificial Sequence
  chemically synthesized
ttcatctcatcaggtgttacct

SEQ ID NO: 36202 - DNA, 22 bp, Artificial Sequence
  chemically synthesized
atctcatcaggtgttacctaga

SEQ ID NO: 36203 - DNA, 22 bp, Artificial Sequence
  chemically synthesized
atcaggtgttacctagaatcag

SEQ ID NO: 36204 - DNA, 22 bp, Artificial Sequence
  chemically synthesized
cctagaatcagagtcaggagaa

SEQ ID NO: 36205 - DNA, 22 bp, Artificial Sequence
  chemically synthesized
gaatcagagtcaggagaaagca

SEQ ID NO: 36206 - DNA, 22 bp, Artificial Sequence
  chemically synthesized
ataaaactactctgacaagtaa

SEQ ID NO: 36207 - DNA, 22 bp, Artificial Sequence
  chemically synthesized
ctctgacaagtaaaccatatcc

SEQ ID NO: 36208 - DNA, 22 bp, Artificial Sequence
  chemically synthesized
tgacaagtaaaccatatcctgg

SEQ ID NO: 36209 - DNA, 22 bp, Artificial Sequence
  chemically synthesized
acaagtaaaccatatcctgggg

SEQ ID NO: 36210 - DNA, 22 bp, Artificial Sequence
  chemically synthesized
gggaccaggtgagaattaaaaa

SEQ ID NO: 36211 - DNA, 22 bp, Artificial Sequence
  chemically synthesized
aaaagctgtatactcataagct

SEQ ID NO: 36212 - DNA, 22 bp, Artificial Sequence
  chemically synthesized
tatactcataagctgccaaaga

SEQ ID NO: 36213 - DNA, 22 bp, Artificial Sequence
  chemically synthesized
ataagctgccaaagagctgatg

SEQ ID NO: 36214 - DNA, 22 bp, Artificial Sequence
  chemically synthesized
ccaaagagctgatggtactgaa

SEQ ID NO: 36215 - DNA, 22 bp, Artificial Sequence
  chemically synthesized
atggtactgaagtcacatggag

SEQ ID NO: 36216 - DNA, 22 bp, Artificial Sequence
  chemically synthesized
aagtcacatggagctcaggaat

SEQ ID NO: 36217 - DNA, 22 bp, Artificial Sequence
  chemically synthesized
aggaatttattcttgcatttag

SEQ ID NO: 36218 - DNA, 22 bp, Artificial Sequence
  chemically synthesized
attcttgcatttagaaagtatg

SEQ ID NO: 36219 - DNA, 22 bp, Artificial Sequence
  chemically synthesized
ttcttgcatttagaaagtatgc

SEQ ID NO: 36220 - DNA, 22 bp, Artificial Sequence
  chemically synthesized
ttgcatttagaaagtatgcata

SEQ ID NO: 36221 - DNA, 22 bp, Artificial Sequence
  chemically synthesized
gcatttagaaagtatgcatata

SEQ ID NO: 36222 - DNA, 22 bp, Artificial Sequence
  chemically synthesized
catttagaaagtatgcatataa

SEQ ID NO: 36223 - DNA, 22 bp, Artificial Sequence
  chemically synthesized
agaaagtatgcatataattctc

SEQ ID NO: 36224 - DNA, 22 bp, Artificial Sequence
  chemically synthesized
gaaagtatgcatataattctct

SEQ ID NO: 36225 - DNA, 22 bp, Artificial Sequence
  chemically synthesized
tctcgaaaagaaatgaaatcat

SEQ ID NO: 36226 - DNA, 22 bp, Artificial Sequence
  chemically synthesized
tcgaaaagaaatgaaatcatat

SEQ ID NO: 36227 - DNA, 22 bp, Artificial Sequence
  chemically synthesized
gaaaagaaatgaaatcatattt

SEQ ID NO: 36228 - DNA, 22 bp, Artificial Sequence
  chemically synthesized
ttctgtcggatcaaattattca

SEQ ID NO: 36229 - DNA, 22 bp, Artificial Sequence
  chemically synthesized
tctgtcggatcaaattattcag

SEQ ID NO: 36230 - DNA, 22 bp, Artificial Sequence
  chemically synthesized
ctgtcggatcaaattattcaga

SEQ ID NO: 36231 - DNA, 22 bp, Artificial Sequence
  chemically synthesized
tgtcggatcaaattattcagaa

SEQ ID NO: 36232 - DNA, 22 bp, Artificial Sequence
  chemically synthesized
tcggatcaaattattcagaaat

SEQ ID NO: 36233 - DNA, 22 bp, Artificial Sequence
  chemically synthesized
ttcagaaatccgaactgtagaa

SEQ ID NO: 36234 - DNA, 22 bp, Artificial Sequence
  chemically synthesized
agaaatccgaactgtagaaaac

SEQ ID NO: 36235 - DNA, 22 bp, Artificial Sequence
  chemically synthesized
tagaaaacatacaaacacactt

SEQ ID NO: 36236 - DNA, 22 bp, Artificial Sequence
  chemically synthesized
gcttaatgttagctttttaatc

SEQ ID NO: 36237 - DNA, 22 bp, Artificial Sequence
  chemically synthesized
cttaatgttagctttttaatct

SEQ ID NO: 36238 - DNA, 22 bp, Artificial Sequence
  chemically synthesized
aatgttagctttttaatcttat

SEQ ID NO: 36239 - DNA, 22 bp, Artificial Sequence
  chemically synthesized
atgttagctttttaatcttatt

SEQ ID NO: 36240 - DNA, 22 bp, Artificial Sequence
  chemically synthesized
gctttttaatcttatttttgta

SEQ ID NO: 36241 - DNA, 22 bp, Artificial Sequence
  chemically synthesized
tttaatcttatttttgtacaca

SEQ ID NO: 36242 - DNA, 22 bp, Artificial Sequence
  chemically synthesized
ttaatcttatttttgtacacag

SEQ ID NO: 36243 - DNA, 22 bp, Artificial Sequence
  chemically synthesized
taatcttatttttgtacacagt

SEQ ID NO: 36244 - DNA, 22 bp, Artificial Sequence
  chemically synthesized
aatcttatttttgtacacagta

SEQ ID NO: 36245 - DNA, 22 bp, Artificial Sequence
  chemically synthesized
atcttatttttgtacacagtat

SEQ ID NO: 36246 - DNA, 22 bp, Artificial Sequence
  chemically synthesized
atttttgtacacagtatacttt

SEQ ID NO: 36247 - DNA, 22 bp, Artificial Sequence
  chemically synthesized
tttttgtacacagtatactttt

SEQ ID NO: 36248 - DNA, 22 bp, Artificial Sequence
  chemically synthesized
ttgtacacagtatacttttaca

SEQ ID NO: 36249 - DNA, 22 bp, Artificial Sequence
  chemically synthesized
tgtacacagtatacttttacat

SEQ ID NO: 36250 - DNA, 22 bp, Artificial Sequence
  chemically synthesized
gtacacagtatacttttacata

SEQ ID NO: 36251 - DNA, 22 bp, Artificial Sequence
  chemically synthesized
tacacagtatacttttacatag

SEQ ID NO: 36252 - DNA, 22 bp, Artificial Sequence
  chemically synthesized
ttacataggcactgaaccagct

SEQ ID NO: 36253 - DNA, 22 bp, Artificial Sequence
  chemically synthesized
tacataggcactgaaccagctg

SEQ ID NO: 36254 - DNA, 22 bp, Artificial Sequence
  chemically synthesized
acataggcactgaaccagctgg

SEQ ID NO: 36255 - DNA, 22 bp, Artificial Sequence
  chemically synthesized
cataggcactgaaccagctgga

SEQ ID NO: 36256 - DNA, 22 bp, Artificial Sequence
  chemically synthesized
aaccagctggaaatgaatgctt

SEQ ID NO: 36257 - DNA, 22 bp, Artificial Sequence
  chemically synthesized
gaaatgaatgcttggattttcg

SEQ ID NO: 36258 - DNA, 22 bp, Artificial Sequence
  chemically synthesized
ggattttcgcagctgataaaag

SEQ ID NO: 36259 - DNA, 22 bp, Artificial Sequence
  chemically synthesized
gattttcgcagctgataaaagc

SEQ ID NO: 36260 - DNA, 22 bp, Artificial Sequence
  chemically synthesized
tcgcagctgataaaagcagagt

SEQ ID NO: 36261 - DNA, 22 bp, Artificial Sequence
  chemically synthesized
cgcagctgataaaagcagagtt

SEQ ID NO: 36262 - DNA, 22 bp, Artificial Sequence
  chemically synthesized
gcagctgataaaagcagagttc

SEQ ID NO: 36263 - DNA, 22 bp, Artificial Sequence
  chemically synthesized
ataaaagcagagttcagattct

SEQ ID NO: 36264 - DNA, 22 bp, Artificial Sequence
  chemically synthesized
agattctgtccttgagctcaat

SEQ ID NO: 36265 - DNA, 22 bp, Artificial Sequence
  chemically synthesized
tgtccttgagctcaatgtctgg

SEQ ID NO: 36266 - DNA, 22 bp, Artificial Sequence
  chemically synthesized
tccttgagctcaatgtctggag

SEQ ID NO: 36267 - DNA, 22 bp, Artificial Sequence
  chemically synthesized
gagctcaatgtctggagaaagc

SEQ ID NO: 36268 - DNA, 22 bp, Artificial Sequence
  chemically synthesized
agctcaatgtctggagaaagca

SEQ ID NO: 36269 - DNA, 22 bp, Artificial Sequence
  chemically synthesized
aatgtctggagaaagcagctgt

SEQ ID NO: 36270 - DNA, 22 bp, Artificial Sequence
  chemically synthesized
gagaaagcagctgtgaatactg

SEQ ID NO: 36271 - DNA, 22 bp, Artificial Sequence
  chemically synthesized
tgaatactgcttccttaattca

SEQ ID NO: 36272 - DNA, 22 bp, Artificial Sequence
  chemically synthesized
cttccttaattcagatgccttt

SEQ ID NO: 36273 - DNA, 22 bp, Artificial Sequence
  chemically synthesized
ccttaattcagatgcctttggc

SEQ ID NO: 36274 - DNA, 22 bp, Artificial Sequence
  chemically synthesized
cttaattcagatgcctttggcc

SEQ ID NO: 36275 - DNA, 22 bp, Artificial Sequence
  chemically synthesized
aattcagatgcctttggccgtg

SEQ ID NO: 36276 - DNA, 22 bp, Artificial Sequence
  chemically synthesized
attcagatgcctttggccgtga

SEQ ID NO: 36277 - DNA, 22 bp, Artificial Sequence
  chemically synthesized
agatgcctttggccgtgagggg

SEQ ID NO: 36278 - DNA, 22 bp, Artificial Sequence
  chemically synthesized
tggccgtgaggggcatggcatt

SEQ ID NO: 36279 - DNA, 22 bp, Artificial Sequence
  chemically synthesized
ggccgtgaggggcatggcattt

SEQ ID NO: 36280 - DNA, 22 bp, Artificial Sequence
  chemically synthesized
gccgtgaggggcatggcatttt

SEQ ID NO: 36281 - DNA, 22 bp, Artificial Sequence
  chemically synthesized
taaagctgcaataaactctgta

SEQ ID NO: 36282 - DNA, 22 bp, Artificial Sequence
  chemically synthesized
aaagctgcaataaactctgtac

SEQ ID NO: 36283 - DNA, 22 bp, Artificial Sequence
  chemically synthesized
aagctgcaataaactctgtact

SEQ ID NO: 36284 - DNA, 22 bp, Artificial Sequence
  chemically synthesized
caataaactctgtactttttct

SEQ ID NO: 36285 - DNA, 22 bp, Artificial Sequence
  chemically synthesized
tgtactttttctctcaggggat

SEQ ID NO: 36286 - DNA, 22 bp, Artificial Sequence
  chemically synthesized
tactttttctctcaggggatta

SEQ ID NO: 36287 - DNA, 22 bp, Artificial Sequence
  chemically synthesized
tttctctcaggggattagaaaa

SEQ ID NO: 36288 - DNA, 22 bp, Artificial Sequence
  chemically synthesized
ttctctcaggggattagaaaaa

SEQ ID NO: 36289 - DNA, 22 bp, Artificial Sequence
  chemically synthesized
tctctcaggggattagaaaaac

SEQ ID NO: 36290 - DNA, 22 bp, Artificial Sequence
  chemically synthesized
ctctcaggggattagaaaaacc

SEQ ID NO: 36291 - DNA, 22 bp, Artificial Sequence
  chemically synthesized
tctcaggggattagaaaaacca

SEQ ID NO: 36292 - DNA, 22 bp, Artificial Sequence
  chemically synthesized
tcaggggattagaaaaaccaat

SEQ ID NO: 36293 - DNA, 22 bp, Artificial Sequence
  chemically synthesized
aggggattagaaaaaccaattg

SEQ ID NO: 36294 - DNA, 22 bp, Artificial Sequence
  chemically synthesized
gaaaaaccaattgatttgatag

SEQ ID NO: 36295 - DNA, 22 bp, Artificial Sequence
  chemically synthesized
atttgatagtgactcagcagtt

SEQ ID NO: 36296 - DNA, 22 bp, Artificial Sequence
  chemically synthesized
gatagtgactcagcagttttca

SEQ ID NO: 36297 - DNA, 22 bp, Artificial Sequence
  chemically synthesized
atagtgactcagcagttttcac

SEQ ID NO: 36298 - DNA, 22 bp, Artificial Sequence
  chemically synthesized
agcagttttcaccttcctcttt

SEQ ID NO: 36299 - DNA, 22 bp, Artificial Sequence
  chemically synthesized
tcaccttcctctttagccaatg

SEQ ID NO: 36300 - DNA, 22 bp, Artificial Sequence
  chemically synthesized
caccttcctctttagccaatgc

SEQ ID NO: 36301 - DNA, 22 bp, Artificial Sequence
  chemically synthesized
accttcctctttagccaatgcc

SEQ ID NO: 36302 - DNA, 22 bp, Artificial Sequence
  chemically synthesized
cctctttagccaatgccctgca

SEQ ID NO: 36303 - DNA, 22 bp, Artificial Sequence
  chemically synthesized
ctctttagccaatgccctgcag

SEQ ID NO: 36304 - DNA, 22 bp, Artificial Sequence
  chemically synthesized
tttagccaatgccctgcagcta

SEQ ID NO: 36305 - DNA, 22 bp, Artificial Sequence
  chemically synthesized
tagccaatgccctgcagctaag

SEQ ID NO: 36306 - DNA, 22 bp, Artificial Sequence
  chemically synthesized
agccaatgccctgcagctaaga

SEQ ID NO: 36307 - DNA, 22 bp, Artificial Sequence
  chemically synthesized
gccaatgccctgcagctaagat

SEQ ID NO: 36308 - DNA, 22 bp, Artificial Sequence
  chemically synthesized
cagctaagattgagaaacggat

SEQ ID NO: 36309 - DNA, 22 bp, Artificial Sequence
  chemically synthesized
agattgagaaacggattcagaa

SEQ ID NO: 36310 - DNA, 22 bp, Artificial Sequence
  chemically synthesized
agaaacggattcagaactcaca

SEQ ID NO: 36311 - DNA, 22 bp, Artificial Sequence
  chemically synthesized
agaactcacacctcttggtgct

SEQ ID NO: 36312 - DNA, 22 bp, Artificial Sequence
  chemically synthesized
acacctcttggtgcttggtggc

SEQ ID NO: 36313 - DNA, 22 bp, Artificial Sequence
  chemically synthesized
ttggtgcttggtggctcccttc

SEQ ID NO: 36314 - DNA, 22 bp, Artificial Sequence
  chemically synthesized
ggtgcttggtggctcccttcca

SEQ ID NO: 36315 - DNA, 22 bp, Artificial Sequence
  chemically synthesized
gtgcttggtggctcccttccaa

SEQ ID NO: 36316 - DNA, 22 bp, Artificial Sequence
  chemically synthesized
ggtggctcccttccaaaccatc

SEQ ID NO: 36317 - DNA, 22 bp, Artificial Sequence
  chemically synthesized
gtggctcccttccaaaccatca

SEQ ID NO: 36318 - DNA, 22 bp, Artificial Sequence
  chemically synthesized
ccttccaaaccatcagctgttc

SEQ ID NO: 36319 - DNA, 22 bp, Artificial Sequence
  chemically synthesized
ccaaaccatcagctgttctttc

SEQ ID NO: 36320 - DNA, 22 bp, Artificial Sequence
  chemically synthesized
caaaccatcagctgttctttct

SEQ ID NO: 36321 - DNA, 22 bp, Artificial Sequence
  chemically synthesized
ttctttctactttctttcctat

SEQ ID NO: 36322 - DNA, 22 bp, Artificial Sequence
  chemically synthesized
tttctactttctttcctatttt

SEQ ID NO: 36323 - DNA, 22 bp, Artificial Sequence
  chemically synthesized
tctactttctttcctatttttt

SEQ ID NO: 36324 - DNA, 22 bp, Artificial Sequence
  chemically synthesized
ctactttctttcctatttttta

SEQ ID NO: 36325 - DNA, 22 bp, Artificial Sequence
  chemically synthesized
tactttctttcctattttttaa

SEQ ID NO: 36326 - DNA, 22 bp, Artificial Sequence
  chemically synthesized
ctttctttcctattttttaaag

SEQ ID NO: 36327 - DNA, 22 bp, Artificial Sequence
  chemically synthesized
tctttcctattttttaaagcac

SEQ ID NO: 36328 - DNA, 22 bp, Artificial Sequence
  chemically synthesized
ctttcctattttttaaagcaca

SEQ ID NO: 36329 - DNA, 22 bp, Artificial Sequence
  chemically synthesized
tttcctattttttaaagcacag

SEQ ID NO: 36330 - DNA, 22 bp, Artificial Sequence
  chemically synthesized
tcctattttttaaagcacagtc

SEQ ID NO: 36331 - DNA, 22 bp, Artificial Sequence
  chemically synthesized
cctattttttaaagcacagtct

SEQ ID NO: 36332 - DNA, 22 bp, Artificial Sequence
  chemically synthesized
ctattttttaaagcacagtctg

SEQ ID NO: 36333 - DNA, 22 bp, Artificial Sequence
  chemically synthesized
ttttttaaagcacagtctgaat

SEQ ID NO: 36334 - DNA, 22 bp, Artificial Sequence
  chemically synthesized
tttaaagcacagtctgaatcaa

SEQ ID NO: 36335 - DNA, 22 bp, Artificial Sequence
  chemically synthesized
ttaaagcacagtctgaatcaag

SEQ ID NO: 36336 - DNA, 22 bp, Artificial Sequence
  chemically synthesized
taaagcacagtctgaatcaagt

SEQ ID NO: 36337 - DNA, 22 bp, Artificial Sequence
  chemically synthesized
aaagcacagtctgaatcaagtg

SEQ ID NO: 36338 - DNA, 22 bp, Artificial Sequence
  chemically synthesized
aagcacagtctgaatcaagtgc

SEQ ID NO: 36339 - DNA, 22 bp, Artificial Sequence
  chemically synthesized
aatcaagtgcttcagaaccatt

SEQ ID NO: 36340 - DNA, 22 bp, Artificial Sequence
  chemically synthesized
cagaaccatttatactaactcg

SEQ ID NO: 36341 - DNA, 22 bp, Artificial Sequence
  chemically synthesized
agaaccatttatactaactcgt

SEQ ID NO: 36342 - DNA, 22 bp, Artificial Sequence
  chemically synthesized
atactaactcgtgttccaaaca

SEQ ID NO: 36343 - DNA, 22 bp, Artificial Sequence
  chemically synthesized
tactaactcgtgttccaaacac

SEQ ID NO: 36344 - DNA, 22 bp, Artificial Sequence
  chemically synthesized
actcgtgttccaaacacataac

SEQ ID NO: 36345 - DNA, 22 bp, Artificial Sequence
  chemically synthesized
gtgttccaaacacataaccctg

SEQ ID NO: 36346 - DNA, 22 bp, Artificial Sequence
  chemically synthesized
caaacacataaccctgaaccct

SEQ ID NO: 36347 - DNA, 22 bp, Artificial Sequence
  chemically synthesized
aaccctcttctaaggccaccag

SEQ ID NO: 36348 - DNA, 22 bp, Artificial Sequence
  chemically synthesized
ttctaaggccaccagttacaaa

SEQ ID NO: 36349 - DNA, 22 bp, Artificial Sequence
  chemically synthesized
ctaaggccaccagttacaaaga

SEQ ID NO: 36350 - DNA, 22 bp, Artificial Sequence
  chemically synthesized
taaggccaccagttacaaagaa

SEQ ID NO: 36351 - DNA, 22 bp, Artificial Sequence
  chemically synthesized
aggccaccagttacaaagaatg

SEQ ID NO: 36352 - DNA, 22 bp, Artificial Sequence
  chemically synthesized
caaagaatggggaaggttaatg

SEQ ID NO: 36353 - DNA, 22 bp, Artificial Sequence
  chemically synthesized
atgagtaactccaccagtgcct

SEQ ID NO: 36354 - DNA, 22 bp, Artificial Sequence
  chemically synthesized
caccagtgcctgccagaaagct

SEQ ID NO: 36355 - DNA, 22 bp, Artificial Sequence
  chemically synthesized
ccagaaagctcagctgtactcc

SEQ ID NO: 36356 - DNA, 22 bp, Artificial Sequence
  chemically synthesized
agctgtactccagccttccttc

SEQ ID NO: 36357 - DNA, 22 bp, Artificial Sequence
  chemically synthesized
tactccagccttccttcctctc

SEQ ID NO: 36358 - DNA, 22 bp, Artificial Sequence
  chemically synthesized
cagccttccttcctctcttgca

SEQ ID NO: 36359 - DNA, 22 bp, Artificial Sequence
  chemically synthesized
ccttcctctcttgcagagagaa

SEQ ID NO: 36360 - DNA, 22 bp, Artificial Sequence
  chemically synthesized
cttcctctcttgcagagagaaa

SEQ ID NO: 36361 - DNA, 22 bp, Artificial Sequence
  chemically synthesized
cctctcttgcagagagaaacaa

SEQ ID NO: 36362 - DNA, 22 bp, Artificial Sequence
  chemically synthesized
ctctcttgcagagagaaacaat

SEQ ID NO: 36363 - DNA, 22 bp, Artificial Sequence
  chemically synthesized
tcttgcagagagaaacaatgcg

SEQ ID NO: 36364 - DNA, 22 bp, Artificial Sequence
  chemically synthesized
ttgcagagagaaacaatgcggc

SEQ ID NO: 36365 - DNA, 22 bp, Artificial Sequence
  chemically synthesized
gcagagagaaacaatgcggcag

SEQ ID NO: 36366 - DNA, 22 bp, Artificial Sequence
  chemically synthesized
cagagagaaacaatgcggcagt

SEQ ID NO: 36367 - DNA, 22 bp, Artificial Sequence
  chemically synthesized
aacaaagcgaaggcactgtaat

SEQ ID NO: 36368 - DNA, 22 bp, Artificial Sequence
  chemically synthesized
taatgcccagtggcttcagtca

SEQ ID NO: 36369 - DNA, 22 bp, Artificial Sequence
  chemically synthesized
cagtcacaggctggtctaaaat

SEQ ID NO: 36370 - DNA, 22 bp, Artificial Sequence
  chemically synthesized
agtcacaggctggtctaaaatt

SEQ ID NO: 36371 - DNA, 22 bp, Artificial Sequence
  chemically synthesized
gtctaaaattccatttcacaga

SEQ ID NO: 36372 - DNA, 22 bp, Artificial Sequence
  chemically synthesized
aaattccatttcacagaattga

SEQ ID NO: 36373 - DNA, 22 bp, Artificial Sequence
  chemically synthesized
catttcacagaattgaagataa

SEQ ID NO: 36374 - DNA, 22 bp, Artificial Sequence
  chemically synthesized
cacagaattgaagataatttgg

SEQ ID NO: 36375 - DNA, 22 bp, Artificial Sequence
  chemically synthesized
acagaattgaagataatttggg

SEQ ID NO: 36376 - DNA, 22 bp, Artificial Sequence
  chemically synthesized
aagataatttggggttattacc

SEQ ID NO: 36377 - DNA, 22 bp, Artificial Sequence
  chemically synthesized
ggggttattaccaattctcagc

SEQ ID NO: 36378 - DNA, 22 bp, Artificial Sequence
  chemically synthesized
gggttattaccaattctcagca

SEQ ID NO: 36379 - DNA, 22 bp, Artificial Sequence
  chemically synthesized
ttaccaattctcagcagctcaa

SEQ ID NO: 36380 - DNA, 22 bp, Artificial Sequence
  chemically synthesized
ccaattctcagcagctcaaatt

SEQ ID NO: 36381 - DNA, 22 bp, Artificial Sequence
  chemically synthesized
tcagcagctcaaattcaatccc

SEQ ID NO: 36382 - DNA, 22 bp, Artificial Sequence
  chemically synthesized
agcagctcaaattcaatcccgt

SEQ ID NO: 36383 - DNA, 22 bp, Artificial Sequence
  chemically synthesized
aaattcaatcccgttgatggtg

SEQ ID NO: 36384 - DNA, 22 bp, Artificial Sequence
  chemically synthesized
aatcccgttgatggtgagcatg

SEQ ID NO: 36385 - DNA, 22 bp, Artificial Sequence
  chemically synthesized
atggtgagcatggggttcattt

SEQ ID NO: 36386 - DNA, 22 bp, Artificial Sequence
  chemically synthesized
attttgagagtagaaaattgga

SEQ ID NO: 36387 - DNA, 22 bp, Artificial Sequence
  chemically synthesized
tgagagtagaaaattggatgca

SEQ ID NO: 36388 - DNA, 22 bp, Artificial Sequence
  chemically synthesized
gagagtagaaaattggatgcag

SEQ ID NO: 36389 - DNA, 22 bp, Artificial Sequence
  chemically synthesized
agagtagaaaattggatgcagt

SEQ ID NO: 36390 - DNA, 22 bp, Artificial Sequence
  chemically synthesized
gatgcagtggagaatcagaatg

SEQ ID NO: 36391 - DNA, 22 bp, Artificial Sequence
  chemically synthesized
gatggtctctgccatttcccca

SEQ ID NO: 36392 - DNA, 22 bp, Artificial Sequence
  chemically synthesized
tgccatttccccaaagatatca

SEQ ID NO: 36393 - DNA, 22 bp, Artificial Sequence
  chemically synthesized
ccatttccccaaagatatcatc

SEQ ID NO: 36394 - DNA, 22 bp, Artificial Sequence
  chemically synthesized
ccccaaagatatcatcctaact

SEQ ID NO: 36395 - DNA, 22 bp, Artificial Sequence
  chemically synthesized
cccaaagatatcatcctaactg

SEQ ID NO: 36396 - DNA, 22 bp, Artificial Sequence
  chemically synthesized
actgcatgctgctgcttttaac

SEQ ID NO: 36397 - DNA, 22 bp, Artificial Sequence
  chemically synthesized
catgctgctgcttttaacaaat

SEQ ID NO: 36398 - DNA, 22 bp, Artificial Sequence
  chemically synthesized
ctgcttttaacaaatcagtata

SEQ ID NO: 36399 - DNA, 22 bp, Artificial Sequence
  chemically synthesized
cttttaacaaatcagtatacaa

SEQ ID NO: 36400 - DNA, 22 bp, Artificial Sequence
  chemically synthesized
ttaacaaatcagtatacaactt

SEQ ID NO: 36401 - DNA, 22 bp, Artificial Sequence
  chemically synthesized
taacaaatcagtatacaactta

SEQ ID NO: 36402 - DNA, 22 bp, Artificial Sequence
  chemically synthesized
aacaaatcagtatacaacttag

SEQ ID NO: 36403 - DNA, 22 bp, Artificial Sequence
  chemically synthesized
acaaatcagtatacaacttagt

SEQ ID NO: 36404 - DNA, 22 bp, Artificial Sequence
  chemically synthesized
agtattttttgtgttgacaaat

SEQ ID NO: 36405 - DNA, 22 bp, Artificial Sequence
  chemically synthesized
gtattttttgtgttgacaaatt

SEQ ID NO: 36406 - DNA, 22 bp, Artificial Sequence
  chemically synthesized
tttgtgttgacaaattttcaaa

SEQ ID NO: 36407 - DNA, 22 bp, Artificial Sequence
  chemically synthesized
ttgtgttgacaaattttcaaat

SEQ ID NO: 36408 - DNA, 22 bp, Artificial Sequence
  chemically synthesized
tgtgttgacaaattttcaaata

SEQ ID NO: 36409 - DNA, 22 bp, Artificial Sequence
  chemically synthesized
gtgttgacaaattttcaaatat

SEQ ID NO: 36410 - DNA, 22 bp, Artificial Sequence
  chemically synthesized
tgttgacaaattttcaaatata

SEQ ID NO: 36411 - DNA, 22 bp, Artificial Sequence
  chemically synthesized
acaaattttcaaatatacaaaa

SEQ ID NO: 36412 - DNA, 22 bp, Artificial Sequence
  chemically synthesized
tcaaatatacaaaatattgagt

SEQ ID NO: 36413 - DNA, 22 bp, Artificial Sequence
  chemically synthesized
caaatatacaaaatattgagtc

SEQ ID NO: 36414 - DNA, 22 bp, Artificial Sequence
  chemically synthesized
aaatatacaaaatattgagtct

SEQ ID NO: 36415 - DNA, 22 bp, Artificial Sequence
  chemically synthesized
agtctgaaggcaaaaagaataa

SEQ ID NO: 36416 - DNA, 22 bp, Artificial Sequence
  chemically synthesized
aaggcaaaaagaataatttttc

SEQ ID NO: 36417 - DNA, 22 bp, Artificial Sequence
  chemically synthesized
ttcacttccattgcttcctagg

SEQ ID NO: 36418 - DNA, 22 bp, Artificial Sequence
  chemically synthesized
tcacttccattgcttcctaggt

SEQ ID NO: 36419 - DNA, 22 bp, Artificial Sequence
  chemically synthesized
cacttccattgcttcctaggtc

SEQ ID NO: 36420 - DNA, 22 bp, Artificial Sequence
  chemically synthesized
acttccattgcttcctaggtca

SEQ ID NO: 36421 - DNA, 22 bp, Artificial Sequence
  chemically synthesized
ccattgcttcctaggtcataac

SEQ ID NO: 36422 - DNA, 22 bp, Artificial Sequence
  chemically synthesized
cattgcttcctaggtcataaca

SEQ ID NO: 36423 - DNA, 22 bp, Artificial Sequence
  chemically synthesized
cttcctaggtcataacattcac

SEQ ID NO: 36424 - DNA, 22 bp, Artificial Sequence
  chemically synthesized
cctaggtcataacattcacatc

SEQ ID NO: 36425 - DNA, 22 bp, Artificial Sequence
  chemically synthesized
ctaggtcataacattcacatct

SEQ ID NO: 36426 - DNA, 22 bp, Artificial Sequence
  chemically synthesized
ggtcataacattcacatctgat

SEQ ID NO: 36427 - DNA, 22 bp, Artificial Sequence
  chemically synthesized
acatctgatatttcttccaaat

SEQ ID NO: 36428 - DNA, 22 bp, Artificial Sequence
  chemically synthesized
atatttcttccaaatacagact

SEQ ID NO: 36429 - DNA, 22 bp, Artificial Sequence
  chemically synthesized
cttccaaatacagactgttgtt

SEQ ID NO: 36430 - DNA, 22 bp, Artificial Sequence
  chemically synthesized
ttccaaatacagactgttgttg

SEQ ID NO: 36431 - DNA, 22 bp, Artificial Sequence
  chemically synthesized
ccaaatacagactgttgttggc

SEQ ID NO: 36432 - DNA, 22 bp, Artificial Sequence
  chemically synthesized
caaatacagactgttgttggcc

SEQ ID NO: 36433 - DNA, 22 bp, Artificial Sequence
  chemically synthesized
ttgttggcctgatcatcactca

SEQ ID NO: 36434 - DNA, 22 bp, Artificial Sequence
  chemically synthesized
ttggcctgatcatcactcacac

SEQ ID NO: 36435 - DNA, 22 bp, Artificial Sequence
  chemically synthesized
gcctgatcatcactcacacatc

SEQ ID NO: 36436 - DNA, 22 bp, Artificial Sequence
  chemically synthesized
atcatcactcacacatccaggc

SEQ ID NO: 36437 - DNA, 22 bp, Artificial Sequence
  chemically synthesized
acacatccaggcttgttacatc

SEQ ID NO: 36438 - DNA, 22 bp, Artificial Sequence
  chemically synthesized
gttacatctccacgccactgag

SEQ ID NO: 36439 - DNA, 22 bp, Artificial Sequence
  chemically synthesized
ttacatctccacgccactgagt

SEQ ID NO: 36440 - DNA, 22 bp, Artificial Sequence
  chemically synthesized
catctccacgccactgagtatc

SEQ ID NO: 36441 - DNA, 22 bp, Artificial Sequence
  chemically synthesized
cacgccactgagtatcagggaa

SEQ ID NO: 36442 - DNA, 22 bp, Artificial Sequence
  chemically synthesized
agtatcagggaacctgccccaa

SEQ ID NO: 36443 - DNA, 22 bp, Artificial Sequence
  chemically synthesized
ccccaatattcacgtaggttct

SEQ ID NO: 36444 - DNA, 22 bp, Artificial Sequence
  chemically synthesized
acgtaggttcttttctattttc

SEQ ID NO: 36445 - DNA, 22 bp, Artificial Sequence
  chemically synthesized
ttttctattttccctaagcgtc

SEQ ID NO: 36446 - DNA, 22 bp, Artificial Sequence
  chemically synthesized
ttctattttccctaagcgtcgg

SEQ ID NO: 36447 - DNA, 22 bp, Artificial Sequence
  chemically synthesized
tctattttccctaagcgtcggc

SEQ ID NO: 36448 - DNA, 22 bp, Artificial Sequence
  chemically synthesized
ctattttccctaagcgtcggcc

SEQ ID NO: 36449 - DNA, 22 bp, Artificial Sequence
  chemically synthesized
tattttccctaagcgtcggcca

SEQ ID NO: 36450 - DNA, 22 bp, Artificial Sequence
  chemically synthesized
ttttccctaagcgtcggccaac

SEQ ID NO: 36451 - DNA, 22 bp, Artificial Sequence
  chemically synthesized
tccctaagcgtcggccaacttt

SEQ ID NO: 36452 - DNA, 22 bp, Artificial Sequence
  chemically synthesized
ccctaagcgtcggccaacttta

SEQ ID NO: 36453 - DNA, 22 bp, Artificial Sequence
  chemically synthesized
cctaagcgtcggccaactttag

SEQ ID NO: 36454 - DNA, 22 bp, Artificial Sequence
  chemically synthesized
agcgtcggccaactttagaaat

SEQ ID NO: 36455 - DNA, 22 bp, Artificial Sequence
  chemically synthesized
tagaaataaagggacagagtac

SEQ ID NO: 36456 - DNA, 22 bp, Artificial Sequence
  chemically synthesized
agaaataaagggacagagtaca

SEQ ID NO: 36457 - DNA, 22 bp, Artificial Sequence
  chemically synthesized
gaaataaagggacagagtacaa

SEQ ID NO: 36458 - DNA, 22 bp, Artificial Sequence
  chemically synthesized
taaagccgggcatccgggggag

SEQ ID NO: 36459 - DNA, 22 bp, Artificial Sequence
  chemically synthesized
aaagccgggcatccgggggagg

SEQ ID NO: 36460 - DNA, 22 bp, Artificial Sequence
  chemically synthesized
aagccgggcatccgggggaggc

SEQ ID NO: 36461 - DNA, 22 bp, Artificial Sequence
  chemically synthesized
cggtaggttccgtgatgcccca

SEQ ID NO: 36462 - DNA, 22 bp, Artificial Sequence
  chemically synthesized
ggtaggttccgtgatgccccac

SEQ ID NO: 36463 - DNA, 22 bp, Artificial Sequence
  chemically synthesized
cgtgatgccccacaagccacaa

SEQ ID NO: 36464 - DNA, 22 bp, Artificial Sequence
  chemically synthesized
gtattagggattttcaaatggg

SEQ ID NO: 36465 - DNA, 22 bp, Artificial Sequence
  chemically synthesized
tattagggattttcaaatgggg

SEQ ID NO: 36466 - DNA, 22 bp, Artificial Sequence
  chemically synthesized
gggattttcaaatggggaggca

SEQ ID NO: 36467 - DNA, 22 bp, Artificial Sequence
  chemically synthesized
tcaaatggggaggcagtgtgca

SEQ ID NO: 36468 - DNA, 22 bp, Artificial Sequence
  chemically synthesized
caaatggggaggcagtgtgcaa

SEQ ID NO: 36469 - DNA, 22 bp, Artificial Sequence
  chemically synthesized
aaatggggaggcagtgtgcaaa

SEQ ID NO: 36470 - DNA, 22 bp, Artificial Sequence
  chemically synthesized
tacaaggtaatagaatatcaca

SEQ ID NO: 36471 - DNA, 22 bp, Artificial Sequence
  chemically synthesized
acaaggtaatagaatatcacaa

SEQ ID NO: 36472 - DNA, 22 bp, Artificial Sequence
  chemically synthesized
caaggtaatagaatatcacaag

SEQ ID NO: 36473 - DNA, 22 bp, Artificial Sequence
  chemically synthesized
aaattgctaatgaagtttcggg

SEQ ID NO: 36474 - DNA, 22 bp, Artificial Sequence
  chemically synthesized
ctaatgaagtttcgggcaccat

SEQ ID NO: 36475 - DNA, 22 bp, Artificial Sequence
  chemically synthesized
atgaagtttcgggcaccattgt

SEQ ID NO: 36476 - DNA, 22 bp, Artificial Sequence
  chemically synthesized
cgggcaccattgtcattgataa

SEQ ID NO: 36477 - DNA, 22 bp, Artificial Sequence
  chemically synthesized
gggcaccattgtcattgataac

SEQ ID NO: 36478 - DNA, 22 bp, Artificial Sequence
  chemically synthesized
tcattgataacatcttatcagg

SEQ ID NO: 36479 - DNA, 22 bp, Artificial Sequence
  chemically synthesized
ataacatcttatcaggagacag

SEQ ID NO: 36480 - DNA, 22 bp, Artificial Sequence
  chemically synthesized
atcaggagacagggtttttagg

SEQ ID NO: 36481 - DNA, 22 bp, Artificial Sequence
  chemically synthesized
tcaggagacagggtttttagga

SEQ ID NO: 36482 - DNA, 22 bp, Artificial Sequence
  chemically synthesized
ttaggatcaactggtctgacca

SEQ ID NO: 36483 - DNA, 22 bp, Artificial Sequence
  chemically synthesized
taggatcaactggtctgaccaa

SEQ ID NO: 36484 - DNA, 22 bp, Artificial Sequence
  chemically synthesized
aggatcaactggtctgaccaaa

SEQ ID NO: 36485 - DNA, 22 bp, Artificial Sequence
  chemically synthesized
ggatcaactggtctgaccaaaa

SEQ ID NO: 36486 - DNA, 22 bp, Artificial Sequence
  chemically synthesized
gtctgaccaaaatttattaggc

SEQ ID NO: 36487 - DNA, 22 bp, Artificial Sequence
  chemically synthesized
accaaaatttattaggcgggaa

SEQ ID NO: 36488 - DNA, 22 bp, Artificial Sequence
  chemically synthesized
attaggcgggaatttcctcttc

SEQ ID NO: 36489 - DNA, 22 bp, Artificial Sequence
  chemically synthesized
ttaggcgggaatttcctcttcc

SEQ ID NO: 36490 - DNA, 22 bp, Artificial Sequence
  chemically synthesized
ggcgggaatttcctcttcctaa

SEQ ID NO: 36491 - DNA, 22 bp, Artificial Sequence
  chemically synthesized
cctcttcctaataagcctggga

SEQ ID NO: 36492 - DNA, 22 bp, Artificial Sequence
  chemically synthesized
ctcttcctaataagcctgggag

SEQ ID NO: 36493 - DNA, 22 bp, Artificial Sequence
  chemically synthesized
ttcctaataagcctgggagcgc

SEQ ID NO: 36494 - DNA, 22 bp, Artificial Sequence
  chemically synthesized
cctaataagcctgggagcgctg

SEQ ID NO: 36495 - DNA, 22 bp, Artificial Sequence
  chemically synthesized
ctaataagcctgggagcgctgt

SEQ ID NO: 36496 - DNA, 22 bp, Artificial Sequence
  chemically synthesized
ataagcctgggagcgctgtggg

SEQ ID NO: 36497 - DNA, 22 bp, Artificial Sequence
  chemically synthesized
ggagcgctgtgggagactgggg

SEQ ID NO: 36498 - DNA, 22 bp, Artificial Sequence
  chemically synthesized
tgggagactggggtctatttca

SEQ ID NO: 36499 - DNA, 22 bp, Artificial Sequence
  chemically synthesized
gggtctatttcacccctgcagt

SEQ ID NO: 36500 - DNA, 22 bp, Artificial Sequence
  chemically synthesized
tttcacccctgcagtctcgacc

SEQ ID NO: 36501 - DNA, 22 bp, Artificial Sequence
  chemically synthesized
cacccctgcagtctcgaccata

SEQ ID NO: 36502 - DNA, 22 bp, Artificial Sequence
  chemically synthesized
acccctgcagtctcgaccataa

SEQ ID NO: 36503 - DNA, 22 bp, Artificial Sequence
  chemically synthesized
cagtctcgaccataagagacag

SEQ ID NO: 36504 - DNA, 22 bp, Artificial Sequence
  chemically synthesized
gaccataagagacaggcgcacc

SEQ ID NO: 36505 - DNA, 22 bp, Artificial Sequence
  chemically synthesized
gaggggggctgtttataagcct

SEQ ID NO: 36506 - DNA, 22 bp, Artificial Sequence
  chemically synthesized
tttataagcctatacctcctgg

SEQ ID NO: 36507 - DNA, 22 bp, Artificial Sequence
  chemically synthesized
ataagcctatacctcctggctc

SEQ ID NO: 36508 - DNA, 22 bp, Artificial Sequence
  chemically synthesized
taagcctatacctcctggctcg

SEQ ID NO: 36509 - DNA, 22 bp, Artificial Sequence
  chemically synthesized
tacctcctggctcgtattctct

SEQ ID NO: 36510 - DNA, 22 bp, Artificial Sequence
  chemically synthesized
ctggctcgtattctctttctca

SEQ ID NO: 36511 - DNA, 22 bp, Artificial Sequence
  chemically synthesized
gctcgtattctctttctcaggg

SEQ ID NO: 36512 - DNA, 22 bp, Artificial Sequence
  chemically synthesized
gtattctctttctcagggatgt

SEQ ID NO: 36513 - DNA, 22 bp, Artificial Sequence
  chemically synthesized
tctttctcagggatgttccatg

SEQ ID NO: 36514 - DNA, 22 bp, Artificial Sequence
  chemically synthesized
tttctcagggatgttccatgct

SEQ ID NO: 36515 - DNA, 22 bp, Artificial Sequence
  chemically synthesized
tctcagggatgttccatgctga

SEQ ID NO: 36516 - DNA, 22 bp, Artificial Sequence
  chemically synthesized
ctcagggatgttccatgctgag

SEQ ID NO: 36517 - DNA, 22 bp, Artificial Sequence
  chemically synthesized
tcagggatgttccatgctgaga

SEQ ID NO: 36518 - DNA, 22 bp, Artificial Sequence
  chemically synthesized
agggatgttccatgctgagaaa

SEQ ID NO: 36519 - DNA, 22 bp, Artificial Sequence
  chemically synthesized
catgctgagaaaaagaattcag

SEQ ID NO: 36520 - DNA, 22 bp, Artificial Sequence
  chemically synthesized
agaaaaagaattcagcgatatt

SEQ ID NO: 36521 - DNA, 22 bp, Artificial Sequence
  chemically synthesized
agcgatatttctcccatttgct

SEQ ID NO: 36522 - DNA, 22 bp, Artificial Sequence
  chemically synthesized
ctcccatttgcttttgaaagaa

SEQ ID NO: 36523 - DNA, 22 bp, Artificial Sequence
  chemically synthesized
tcccatttgcttttgaaagaag

SEQ ID NO: 36524 - DNA, 22 bp, Artificial Sequence
  chemically synthesized
ccatttgcttttgaaagaagag

SEQ ID NO: 36525 - DNA, 22 bp, Artificial Sequence
  chemically synthesized
gcttttgaaagaagagaaatat

SEQ ID NO: 36526 - DNA, 22 bp, Artificial Sequence
  chemically synthesized
cttttgaaagaagagaaatatg

SEQ ID NO: 36527 - DNA, 22 bp, Artificial Sequence
  chemically synthesized
ttgaaagaagagaaatatggct

SEQ ID NO: 36528 - DNA, 22 bp, Artificial Sequence
  chemically synthesized
tgaaagaagagaaatatggctc

SEQ ID NO: 36529 - DNA, 22 bp, Artificial Sequence
  chemically synthesized
gaaagaagagaaatatggctct

SEQ ID NO: 36530 - DNA, 22 bp, Artificial Sequence
  chemically synthesized
aaagaagagaaatatggctctg

SEQ ID NO: 36531 - DNA, 22 bp, Artificial Sequence
  chemically synthesized
tgttctgcctggctcaccagca

SEQ ID NO: 36532 - DNA, 22 bp, Artificial Sequence
  chemically synthesized
ttctgcctggctcaccagcagt

SEQ ID NO: 36533 - DNA, 22 bp, Artificial Sequence
  chemically synthesized
tgcctggctcaccagcagtcag

SEQ ID NO: 36534 - DNA, 22 bp, Artificial Sequence
  chemically synthesized
cctggctcaccagcagtcagag

SEQ ID NO: 36535 - DNA, 22 bp, Artificial Sequence
  chemically synthesized
gctcaccagcagtcagagttta

SEQ ID NO: 36536 - DNA, 22 bp, Artificial Sequence
  chemically synthesized
accagcagtcagagtttaaggt

SEQ ID NO: 36537 - DNA, 22 bp, Artificial Sequence
  chemically synthesized
aaggttatctctcttattccct

SEQ ID NO: 36538 - DNA, 22 bp, Artificial Sequence
  chemically synthesized
aggttatctctcttattccctg

SEQ ID NO: 36539 - DNA, 22 bp, Artificial Sequence
  chemically synthesized
tctctcttattccctgaacaat

SEQ ID NO: 36540 - DNA, 22 bp, Artificial Sequence
  chemically synthesized
tcttattccctgaacaattgct

SEQ ID NO: 36541 - DNA, 22 bp, Artificial Sequence
  chemically synthesized
ttattccctgaacaattgctgt

SEQ ID NO: 36542 - DNA, 22 bp, Artificial Sequence
  chemically synthesized
attccctgaacaattgctgtta

SEQ ID NO: 36543 - DNA, 22 bp, Artificial Sequence
  chemically synthesized
ttccctgaacaattgctgttat

SEQ ID NO: 36544 - DNA, 22 bp, Artificial Sequence
  chemically synthesized
cctgaacaattgctgttatcct

SEQ ID NO: 36545 - DNA, 22 bp, Artificial Sequence
  chemically synthesized
aacaattgctgttatcctgttc

SEQ ID NO: 36546 - DNA, 22 bp, Artificial Sequence
  chemically synthesized
ctgttatcctgttcttttttca

SEQ ID NO: 36547 - DNA, 22 bp, Artificial Sequence
  chemically synthesized
ttatcctgttcttttttcaagg

SEQ ID NO: 36548 - DNA, 22 bp, Artificial Sequence
  chemically synthesized
tcctgttcttttttcaaggtgt

SEQ ID NO: 36549 - DNA, 22 bp, Artificial Sequence
  chemically synthesized
ttcttttttcaaggtgtccaca

SEQ ID NO: 36550 - DNA, 22 bp, Artificial Sequence
  chemically synthesized
ttttttcaaggtgtccacattt

SEQ ID NO: 36551 - DNA, 22 bp, Artificial Sequence
  chemically synthesized
ttttcaaggtgtccacatttca

SEQ ID NO: 36552 - DNA, 22 bp, Artificial Sequence
  chemically synthesized
tttcaaggtgtccacatttcat

SEQ ID NO: 36553 - DNA, 22 bp, Artificial Sequence
  chemically synthesized
ttcaaggtgtccacatttcatg

SEQ ID NO: 36554 - DNA, 22 bp, Artificial Sequence
  chemically synthesized
tcaaggtgtccacatttcatgt

SEQ ID NO: 36555 - DNA, 22 bp, Artificial Sequence
  chemically synthesized
caaggtgtccacatttcatgtt

SEQ ID NO: 36556 - DNA, 22 bp, Artificial Sequence
  chemically synthesized
aaggtgtccacatttcatgttg

SEQ ID NO: 36557 - DNA, 22 bp, Artificial Sequence
  chemically synthesized
catgttgctcaaacacacatgc

SEQ ID NO: 36558 - DNA, 22 bp, Artificial Sequence
  chemically synthesized
atgttgctcaaacacacatgct

SEQ ID NO: 36559 - DNA, 22 bp, Artificial Sequence
  chemically synthesized
ctcaaacacacatgctgtacaa

SEQ ID NO: 36560 - DNA, 22 bp, Artificial Sequence
  chemically synthesized
aaacacacatgctgtacaattt

SEQ ID NO: 36561 - DNA, 22 bp, Artificial Sequence
  chemically synthesized
tacaatttgtgcagttaatgca

SEQ ID NO: 36562 - DNA, 22 bp, Artificial Sequence
  chemically synthesized
gtgcagttaatgcaattattac

SEQ ID NO: 36563 - DNA, 22 bp, Artificial Sequence
  chemically synthesized
tgcagttaatgcaattattaca

SEQ ID NO: 36564 - DNA, 22 bp, Artificial Sequence
  chemically synthesized
atgcaattattacagggtcctg

SEQ ID NO: 36565 - DNA, 22 bp, Artificial Sequence
  chemically synthesized
ttacagggtcctgaggcaatat

SEQ ID NO: 36566 - DNA, 22 bp, Artificial Sequence
  chemically synthesized
cagggtcctgaggcaatataca

SEQ ID NO: 36567 - DNA, 22 bp, Artificial Sequence
  chemically synthesized
aggcaatatacatcctcctcag

SEQ ID NO: 36568 - DNA, 22 bp, Artificial Sequence
  chemically synthesized
ctcagctgacaggattaagaga

SEQ ID NO: 36569 - DNA, 22 bp, Artificial Sequence
  chemically synthesized
agctgacaggattaagagatta

SEQ ID NO: 36570 - DNA, 22 bp, Artificial Sequence
  chemically synthesized
acaggattaagagattaaagta

SEQ ID NO: 36571 - DNA, 22 bp, Artificial Sequence
  chemically synthesized
agagattaaagtaaagacaggc

SEQ ID NO: 36572 - DNA, 22 bp, Artificial Sequence
  chemically synthesized
aagtaaagacaggcataaatca

SEQ ID NO: 36573 - DNA, 22 bp, Artificial Sequence
  chemically synthesized
actggggaagtgataagtgtcc

SEQ ID NO: 36574 - DNA, 22 bp, Artificial Sequence
  chemically synthesized
gggaagtgataagtgtccatga

SEQ ID NO: 36575 - DNA, 22 bp, Artificial Sequence
  chemically synthesized
tacaatttatgtttagagattg

SEQ ID NO: 36576 - DNA, 22 bp, Artificial Sequence
  chemically synthesized
acaatttatgtttagagattgc

SEQ ID NO: 36577 - DNA, 22 bp, Artificial Sequence
  chemically synthesized
caatttatgtttagagattgca

SEQ ID NO: 36578 - DNA, 22 bp, Artificial Sequence
  chemically synthesized
atgtttagagattgcagtaaag

SEQ ID NO: 36579 - DNA, 22 bp, Artificial Sequence
  chemically synthesized
tgtttagagattgcagtaaaga

SEQ ID NO: 36580 - DNA, 22 bp, Artificial Sequence
  chemically synthesized
agagattgcagtaaagacaggc

SEQ ID NO: 36581 - DNA, 22 bp, Artificial Sequence
  chemically synthesized
gagattgcagtaaagacaggca

SEQ ID NO: 36582 - DNA, 22 bp, Artificial Sequence
  chemically synthesized
cagtaaagacaggcataagaaa

SEQ ID NO: 36583 - DNA, 22 bp, Artificial Sequence
  chemically synthesized
caaaagtattaatttggggaac

SEQ ID NO: 36584 - DNA, 22 bp, Artificial Sequence
  chemically synthesized
atttggggaactaataaatgtc

SEQ ID NO: 36585 - DNA, 22 bp, Artificial Sequence
  chemically synthesized
ggggaactaataaatgtccatg

SEQ ID NO: 36586 - DNA, 22 bp, Artificial Sequence
  chemically synthesized
gggaactaataaatgtccatga

SEQ ID NO: 36587 - DNA, 22 bp, Artificial Sequence
  chemically synthesized
ataaatgtccatgaaatcttca

SEQ ID NO: 36588 - DNA, 22 bp, Artificial Sequence
  chemically synthesized
cacaatccacgaacttctgcca

SEQ ID NO: 36589 - DNA, 22 bp, Artificial Sequence
  chemically synthesized
acaatccacgaacttctgccat

SEQ ID NO: 36590 - DNA, 22 bp, Artificial Sequence
  chemically synthesized
ctgccatggcttcagctgatcc

SEQ ID NO: 36591 - DNA, 22 bp, Artificial Sequence
  chemically synthesized
tgccatggcttcagctgatccc

SEQ ID NO: 36592 - DNA, 22 bp, Artificial Sequence
  chemically synthesized
ccatggcttcagctgatccctc

SEQ ID NO: 36593 - DNA, 22 bp, Artificial Sequence
  chemically synthesized
cagctgatccctccgtttggag

SEQ ID NO: 36594 - DNA, 22 bp, Artificial Sequence
  chemically synthesized
agctgatccctccgtttggagt

SEQ ID NO: 36595 - DNA, 22 bp, Artificial Sequence
  chemically synthesized
atccctccgtttggagtcccag

SEQ ID NO: 36596 - DNA, 22 bp, Artificial Sequence
  chemically synthesized
cgtttggagtcccagacttccc

SEQ ID NO: 36597 - DNA, 22 bp, Artificial Sequence
  chemically synthesized
ggagtcccagacttcccgcaac

SEQ ID NO: 36598 - DNA, 22 bp, Artificial Sequence
  chemically synthesized
gagtcccagacttcccgcaaca

SEQ ID NO: 36599 - DNA, 22 bp, Artificial Sequence
  chemically synthesized
cccgcaacaactgagaactctg

SEQ ID NO: 36600 - DNA, 22 bp, Artificial Sequence
  chemically synthesized
ccgcaacaactgagaactctgg

SEQ ID NO: 36601 - DNA, 22 bp, Artificial Sequence
  chemically synthesized
agaactctggagggcctaccct

SEQ ID NO: 36602 - DNA, 22 bp, Artificial Sequence
  chemically synthesized
tggagggcctacccttcaccca

SEQ ID NO: 36603 - DNA, 22 bp, Artificial Sequence
  chemically synthesized
gagggcctacccttcacccact

SEQ ID NO: 36604 - DNA, 22 bp, Artificial Sequence
  chemically synthesized
cccttcacccacttccaccctt

SEQ ID NO: 36605 - DNA, 22 bp, Artificial Sequence
  chemically synthesized
cacccacttccacccttcttat

SEQ ID NO: 36606 - DNA, 22 bp, Artificial Sequence
  chemically synthesized
acccacttccacccttcttata

SEQ ID NO: 36607 - DNA, 22 bp, Artificial Sequence
  chemically synthesized
ccacccttcttatatctcttaa

SEQ ID NO: 36608 - DNA, 22 bp, Artificial Sequence
  chemically synthesized
cacccttcttatatctcttaag

SEQ ID NO: 36609 - DNA, 22 bp, Artificial Sequence
  chemically synthesized
cttatatctcttaaggagctgt

SEQ ID NO: 36610 - DNA, 22 bp, Artificial Sequence
  chemically synthesized
ttatatctcttaaggagctgtg

SEQ ID NO: 36611 - DNA, 22 bp, Artificial Sequence
  chemically synthesized
atatctcttaaggagctgtgtt

SEQ ID NO: 36612 - DNA, 22 bp, Artificial Sequence
  chemically synthesized
tatctcttaaggagctgtgttc

SEQ ID NO: 36613 - DNA, 22 bp, Artificial Sequence
  chemically synthesized
ttaaggagctgtgttcagatgg

SEQ ID NO: 36614 - DNA, 22 bp, Artificial Sequence
  chemically synthesized
aaggagctgtgttcagatggtt

SEQ ID NO: 36615 - DNA, 22 bp, Artificial Sequence
  chemically synthesized
aggagctgtgttcagatggtta

SEQ ID NO: 36616 - DNA, 22 bp, Artificial Sequence
  chemically synthesized
tgttcagatggttacatttcgc

SEQ ID NO: 36617 - DNA, 22 bp, Artificial Sequence
  chemically synthesized
agatggttacatttcgcttgct

SEQ ID NO: 36618 - DNA, 22 bp, Artificial Sequence
  chemically synthesized
catttcgcttgctgagcaagac

SEQ ID NO: 36619 - DNA, 22 bp, Artificial Sequence
  chemically synthesized
cgcttgctgagcaagactgcat

SEQ ID NO: 36620 - DNA, 22 bp, Artificial Sequence
  chemically synthesized
gcttgctgagcaagactgcatt

SEQ ID NO: 36621 - DNA, 22 bp, Artificial Sequence
  chemically synthesized
gctgagcaagactgcattttca

SEQ ID NO: 36622 - DNA, 22 bp, Artificial Sequence
  chemically synthesized
ctgagcaagactgcattttcat

SEQ ID NO: 36623 - DNA, 22 bp, Artificial Sequence
  chemically synthesized
agcaagactgcattttcattat

SEQ ID NO: 36624 - DNA, 22 bp, Artificial Sequence
  chemically synthesized
cattttcattatcctgggctaa

SEQ ID NO: 36625 - DNA, 22 bp, Artificial Sequence
  chemically synthesized
tcattatcctgggctaaaatca

SEQ ID NO: 36626 - DNA, 22 bp, Artificial Sequence
  chemically synthesized
cattatcctgggctaaaatcaa

SEQ ID NO: 36627 - DNA, 22 bp, Artificial Sequence
  chemically synthesized
attatcctgggctaaaatcaat

SEQ ID NO: 36628 - DNA, 22 bp, Artificial Sequence
  chemically synthesized
tcctgggctaaaatcaattggt

SEQ ID NO: 36629 - DNA, 22 bp, Artificial Sequence
  chemically synthesized
ggctaaaatcaattggtattta

SEQ ID NO: 36630 - DNA, 22 bp, Artificial Sequence
  chemically synthesized
aaatcaattggtatttaagtta

SEQ ID NO: 36631 - DNA, 22 bp, Artificial Sequence
  chemically synthesized
gtatttaagttagagcaaaaag

SEQ ID NO: 36632 - DNA, 22 bp, Artificial Sequence
  chemically synthesized
aagttagagcaaaaagggttct

SEQ ID NO: 36633 - DNA, 22 bp, Artificial Sequence
  chemically synthesized
agttagagcaaaaagggttcta

SEQ ID NO: 36634 - DNA, 22 bp, Artificial Sequence
  chemically synthesized
gagcaaaaagggttctaaccct

SEQ ID NO: 36635 - DNA, 22 bp, Artificial Sequence
  chemically synthesized
taaccctatttacagcagcaca

SEQ ID NO: 36636 - DNA, 22 bp, Artificial Sequence
  chemically synthesized
accctatttacagcagcacaca

SEQ ID NO: 36637 - DNA, 22 bp, Artificial Sequence
  chemically synthesized
tttacagcagcacacatacact

SEQ ID NO: 36638 - DNA, 22 bp, Artificial Sequence
  chemically synthesized
acagcagcacacatacacttac

SEQ ID NO: 36639 - DNA, 22 bp, Artificial Sequence
  chemically synthesized
cagcagcacacatacacttaca

SEQ ID NO: 36640 - DNA, 22 bp, Artificial Sequence
  chemically synthesized
acattagaattggctttaaggg

SEQ ID NO: 36641 - DNA, 22 bp, Artificial Sequence
  chemically synthesized
cattagaattggctttaaggga

SEQ ID NO: 36642 - DNA, 22 bp, Artificial Sequence
  chemically synthesized
gaattggctttaagggaaaaat

SEQ ID NO: 36643 - DNA, 22 bp, Artificial Sequence
  chemically synthesized
gctttaagggaaaaattcaatc

SEQ ID NO: 36644 - DNA, 22 bp, Artificial Sequence
  chemically synthesized
taagggaaaaattcaatcaatc

SEQ ID NO: 36645 - DNA, 22 bp, Artificial Sequence
  chemically synthesized
aagggaaaaattcaatcaatcg

SEQ ID NO: 36646 - DNA, 22 bp, Artificial Sequence
  chemically synthesized
agggaaaaattcaatcaatcga

SEQ ID NO: 36647 - DNA, 22 bp, Artificial Sequence
  chemically synthesized
aatcaatcgacaaatttccact

SEQ ID NO: 36648 - DNA, 22 bp, Artificial Sequence
  chemically synthesized
ccactgattaccttctatgagc

SEQ ID NO: 36649 - DNA, 22 bp, Artificial Sequence
  chemically synthesized
cactgattaccttctatgagcc

SEQ ID NO: 36650 - DNA, 22 bp, Artificial Sequence
  chemically synthesized
attaccttctatgagccaagac

SEQ ID NO: 36651 - DNA, 22 bp, Artificial Sequence
  chemically synthesized
ccttctatgagccaagactgcc

SEQ ID NO: 36652 - DNA, 22 bp, Artificial Sequence
  chemically synthesized
ctatgagccaagactgccatag

SEQ ID NO: 36653 - DNA, 22 bp, Artificial Sequence
  chemically synthesized
tatgagccaagactgccatagt

SEQ ID NO: 36654 - DNA, 22 bp, Artificial Sequence
  chemically synthesized
tgagccaagactgccatagtct

SEQ ID NO: 36655 - DNA, 22 bp, Artificial Sequence
  chemically synthesized
ccatagtctcagccttcatgca

SEQ ID NO: 36656 - DNA, 22 bp, Artificial Sequence
  chemically synthesized
agccttcatgcagcttataggc

SEQ ID NO: 36657 - DNA, 22 bp, Artificial Sequence
  chemically synthesized
catgcagcttataggctagcaa

SEQ ID NO: 36658 - DNA, 22 bp, Artificial Sequence
  chemically synthesized
atgcagcttataggctagcaaa

SEQ ID NO: 36659 - DNA, 22 bp, Artificial Sequence
  chemically synthesized
ataggctagcaaaaaagccaga

SEQ ID NO: 36660 - DNA, 22 bp, Artificial Sequence
  chemically synthesized
taggctagcaaaaaagccagac

SEQ ID NO: 36661 - DNA, 22 bp, Artificial Sequence
  chemically synthesized
gcaaaaaagccagacagtgcac

SEQ ID NO: 36662 - DNA, 22 bp, Artificial Sequence
  chemically synthesized
acaagtgtgttgagtgttgcaa

SEQ ID NO: 36663 - DNA, 22 bp, Artificial Sequence
  chemically synthesized
agtgttgcaagagtaagtttca

SEQ ID NO: 36664 - DNA, 22 bp, Artificial Sequence
  chemically synthesized
caagagtaagtttcaggggctc

SEQ ID NO: 36665 - DNA, 22 bp, Artificial Sequence
  chemically synthesized
caggggctctccatgacttacc

SEQ ID NO: 36666 - DNA, 22 bp, Artificial Sequence
  chemically synthesized
aggggctctccatgacttacct

SEQ ID NO: 36667 - DNA, 22 bp, Artificial Sequence
  chemically synthesized
tccatgacttacctggttgaga

SEQ ID NO: 36668 - DNA, 22 bp, Artificial Sequence
  chemically synthesized
catgacttacctggttgagaaa

SEQ ID NO: 36669 - DNA, 22 bp, Artificial Sequence
  chemically synthesized
acctggttgagaaaccctttaa

SEQ ID NO: 36670 - DNA, 22 bp, Artificial Sequence
  chemically synthesized
cctggttgagaaaccctttaac

SEQ ID NO: 36671 - DNA, 22 bp, Artificial Sequence
  chemically synthesized
gttgagaaaccctttaactttt

SEQ ID NO: 36672 - DNA, 22 bp, Artificial Sequence
  chemically synthesized
agaaaccctttaactttttttt

SEQ ID NO: 36673 - DNA, 22 bp, Artificial Sequence
  chemically synthesized
taactttttttttcctctgggt

SEQ ID NO: 36674 - DNA, 22 bp, Artificial Sequence
  chemically synthesized
aactttttttttcctctgggtg

SEQ ID NO: 36675 - DNA, 22 bp, Artificial Sequence
  chemically synthesized
actttttttttcctctgggtgt

SEQ ID NO: 36676 - DNA, 22 bp, Artificial Sequence
  chemically synthesized
tttttttcctctgggtgtaaag

SEQ ID NO: 36677 - DNA, 22 bp, Artificial Sequence
  chemically synthesized
ttttttcctctgggtgtaaagt

SEQ ID NO: 36678 - DNA, 22 bp, Artificial Sequence
  chemically synthesized
tttttcctctgggtgtaaagtg

SEQ ID NO: 36679 - DNA, 22 bp, Artificial Sequence
  chemically synthesized
ttttcctctgggtgtaaagtga

SEQ ID NO: 36680 - DNA, 22 bp, Artificial Sequence
  chemically synthesized
tttcctctgggtgtaaagtgaa

SEQ ID NO: 36681 - DNA, 22 bp, Artificial Sequence
  chemically synthesized
ttcctctgggtgtaaagtgaag

SEQ ID NO: 36682 - DNA, 22 bp, Artificial Sequence
  chemically synthesized
tcctctgggtgtaaagtgaaga

SEQ ID NO: 36683 - DNA, 22 bp, Artificial Sequence
  chemically synthesized
cctctgggtgtaaagtgaagag

SEQ ID NO: 36684 - DNA, 22 bp, Artificial Sequence
  chemically synthesized
ctctgggtgtaaagtgaagaga

SEQ ID NO: 36685 - DNA, 22 bp, Artificial Sequence
  chemically synthesized
tgggtgtaaagtgaagagatgg

SEQ ID NO: 36686 - DNA, 22 bp, Artificial Sequence
  chemically synthesized
ggtgtaaagtgaagagatggca

SEQ ID NO: 36687 - DNA, 22 bp, Artificial Sequence
  chemically synthesized
cattgtgtcattgtgaaaagat

SEQ ID NO: 36688 - DNA, 22 bp, Artificial Sequence
  chemically synthesized
tgtcattgtgaaaagatgctgg

SEQ ID NO: 36689 - DNA, 22 bp, Artificial Sequence
  chemically synthesized
tgaaaagatgctgggctggcgt

SEQ ID NO: 36690 - DNA, 22 bp, Artificial Sequence
  chemically synthesized
ggctggcgtgtctcctgaaggc

SEQ ID NO: 36691 - DNA, 22 bp, Artificial Sequence
  chemically synthesized
gcgtgtctcctgaaggccaccc

SEQ ID NO: 36692 - DNA, 22 bp, Artificial Sequence
  chemically synthesized
ctgaaggccacccatatcttta

SEQ ID NO: 36693 - DNA, 22 bp, Artificial Sequence
  chemically synthesized
aaggccacccatatctttaaac

SEQ ID NO: 36694 - DNA, 22 bp, Artificial Sequence
  chemically synthesized
taaactttattttcatgcattc

SEQ ID NO: 36695 - DNA, 22 bp, Artificial Sequence
  chemically synthesized
aaactttattttcatgcattcg

SEQ ID NO: 36696 - DNA, 22 bp, Artificial Sequence
  chemically synthesized
aactttattttcatgcattcgc

SEQ ID NO: 36697 - DNA, 22 bp, Artificial Sequence
  chemically synthesized
tattttcatgcattcgcacaaa

SEQ ID NO: 36698 - DNA, 22 bp, Artificial Sequence
  chemically synthesized
attttcatgcattcgcacaaat

SEQ ID NO: 36699 - DNA, 22 bp, Artificial Sequence
  chemically synthesized
ttttcatgcattcgcacaaata

SEQ ID NO: 36700 - DNA, 22 bp, Artificial Sequence
  chemically synthesized
tcatgcattcgcacaaatatag

SEQ ID NO: 36701 - DNA, 22 bp, Artificial Sequence
  chemically synthesized
catgcattcgcacaaatataga

SEQ ID NO: 36702 - DNA, 22 bp, Artificial Sequence
  chemically synthesized
atgcattcgcacaaatatagat

SEQ ID NO: 36703 - DNA, 22 bp, Artificial Sequence
  chemically synthesized
gcacaaatatagatgtgttcca

SEQ ID NO: 36704 - DNA, 22 bp, Artificial Sequence
  chemically synthesized
catagatgaggcagatagcaga

SEQ ID NO: 36705 - DNA, 22 bp, Artificial Sequence
  chemically synthesized
ctgcctacagcaaggctagttt

SEQ ID NO: 36706 - DNA, 22 bp, Artificial Sequence
  chemically synthesized
tgcctacagcaaggctagtttg

SEQ ID NO: 36707 - DNA, 22 bp, Artificial Sequence
  chemically synthesized
cctacagcaaggctagtttgga

SEQ ID NO: 36708 - DNA, 22 bp, Artificial Sequence
  chemically synthesized
cagcaaggctagtttggagagg

SEQ ID NO: 36709 - DNA, 22 bp, Artificial Sequence
  chemically synthesized
gtttggagagggttttgctgtc

SEQ ID NO: 36710 - DNA, 22 bp, Artificial Sequence
  chemically synthesized
ggagagggttttgctgtcaggg

SEQ ID NO: 36711 - DNA, 22 bp, Artificial Sequence
  chemically synthesized
gagagggttttgctgtcagggt

SEQ ID NO: 36712 - DNA, 22 bp, Artificial Sequence
  chemically synthesized
tgctgtcagggttggacccaca

SEQ ID NO: 36713 - DNA, 22 bp, Artificial Sequence
  chemically synthesized
gctgtcagggttggacccacac

SEQ ID NO: 36714 - DNA, 22 bp, Artificial Sequence
  chemically synthesized
ctgtcagggttggacccacaca

SEQ ID NO: 36715 - DNA, 22 bp, Artificial Sequence
  chemically synthesized
tcagggttggacccacacacct

SEQ ID NO: 36716 - DNA, 22 bp, Artificial Sequence
  chemically synthesized
gacccacacacctcttcataga

SEQ ID NO: 36717 - DNA, 22 bp, Artificial Sequence
  chemically synthesized
ttcatagatgctttttcttttt

SEQ ID NO: 36718 - DNA, 22 bp, Artificial Sequence
  chemically synthesized
catagatgctttttcttttttt

SEQ ID NO: 36719 - DNA, 22 bp, Artificial Sequence
  chemically synthesized
atagatgctttttctttttttt

SEQ ID NO: 36720 - DNA, 22 bp, Artificial Sequence
  chemically synthesized
tttcttttttttcccagagttt

SEQ ID NO: 36721 - DNA, 22 bp, Artificial Sequence
  chemically synthesized
ttcttttttttcccagagtttg

SEQ ID NO: 36722 - DNA, 22 bp, Artificial Sequence
  chemically synthesized
tcttttttttcccagagtttga

SEQ ID NO: 36723 - DNA, 22 bp, Artificial Sequence
  chemically synthesized
cttttttttcccagagtttgaa

SEQ ID NO: 36724 - DNA, 22 bp, Artificial Sequence
  chemically synthesized
ttttttttcccagagtttgaaa

SEQ ID NO: 36725 - DNA, 22 bp, Artificial Sequence
  chemically synthesized
ttttttcccagagtttgaaagg

SEQ ID NO: 36726 - DNA, 22 bp, Artificial Sequence
  chemically synthesized
tttttcccagagtttgaaaggg

SEQ ID NO: 36727 - DNA, 22 bp, Artificial Sequence
  chemically synthesized
ttttcccagagtttgaaaggga

SEQ ID NO: 36728 - DNA, 22 bp, Artificial Sequence
  chemically synthesized
tttcccagagtttgaaagggaa

SEQ ID NO: 36729 - DNA, 22 bp, Artificial Sequence
  chemically synthesized
ttcccagagtttgaaagggaaa

SEQ ID NO: 36730 - DNA, 22 bp, Artificial Sequence
  chemically synthesized
tcccagagtttgaaagggaaat

SEQ ID NO: 36731 - DNA, 22 bp, Artificial Sequence
  chemically synthesized
cccagagtttgaaagggaaatg

SEQ ID NO: 36732 - DNA, 22 bp, Artificial Sequence
  chemically synthesized
ccagagtttgaaagggaaatgg

SEQ ID NO: 36733 - DNA, 22 bp, Artificial Sequence
  chemically synthesized
gaaagggaaatggagtctcaag

SEQ ID NO: 36734 - DNA, 22 bp, Artificial Sequence
  chemically synthesized
aaagggaaatggagtctcaagt

SEQ ID NO: 36735 - DNA, 22 bp, Artificial Sequence
  chemically synthesized
aagttcagggaggttacagtgt

SEQ ID NO: 36736 - DNA, 22 bp, Artificial Sequence
  chemically synthesized
agggaggttacagtgtagaccc

SEQ ID NO: 36737 - DNA, 22 bp, Artificial Sequence
  chemically synthesized
cagtgtagacccacaaatcagc

SEQ ID NO: 36738 - DNA, 22 bp, Artificial Sequence
  chemically synthesized
agtacagctaagggtggagaag

SEQ ID NO: 36739 - DNA, 22 bp, Artificial Sequence
  chemically synthesized
agggtggagaagtctatgcaat

SEQ ID NO: 36740 - DNA, 22 bp, Artificial Sequence
  chemically synthesized
tgcaatatccagcactcttctg

SEQ ID NO: 36741 - DNA, 22 bp, Artificial Sequence
  chemically synthesized
ttctgattaattagaagtcttt

SEQ ID NO: 36742 - DNA, 22 bp, Artificial Sequence
  chemically synthesized
ctgattaattagaagtctttaa

SEQ ID NO: 36743 - DNA, 22 bp, Artificial Sequence
  chemically synthesized
tgattaattagaagtctttaaa

SEQ ID NO: 36744 - DNA, 22 bp, Artificial Sequence
  chemically synthesized
attaattagaagtctttaaaat

SEQ ID NO: 36745 - DNA, 22 bp, Artificial Sequence
  chemically synthesized
attagaagtctttaaaattcac

SEQ ID NO: 36746 - DNA, 22 bp, Artificial Sequence
  chemically synthesized
gaagtctttaaaattcacagaa

SEQ ID NO: 36747 - DNA, 22 bp, Artificial Sequence
  chemically synthesized
taaaattcacagaaaccatatt

SEQ ID NO: 36748 - DNA, 22 bp, Artificial Sequence
  chemically synthesized
aaaattcacagaaaccatattg

SEQ ID NO: 36749 - DNA, 22 bp, Artificial Sequence
  chemically synthesized
aaattcacagaaaccatattgt

SEQ ID NO: 36750 - DNA, 22 bp, Artificial Sequence
  chemically synthesized
acagaaaccatattgtcttccc

SEQ ID NO: 36751 - DNA, 22 bp, Artificial Sequence
  chemically synthesized
tcttccctaaatgattcatatg

SEQ ID NO: 36752 - DNA, 22 bp, Artificial Sequence
  chemically synthesized
ccctaaatgattcatatgtcaa

SEQ ID NO: 36753 - DNA, 22 bp, Artificial Sequence
  chemically synthesized
cctaaatgattcatatgtcaag

SEQ ID NO: 36754 - DNA, 22 bp, Artificial Sequence
  chemically synthesized
aatgattcatatgtcaagacac

SEQ ID NO: 36755 - DNA, 22 bp, Artificial Sequence
  chemically synthesized
atatgtcaagacacagtaaaga

SEQ ID NO: 36756 - DNA, 22 bp, Artificial Sequence
  chemically synthesized
tatgtggaacatcatacacaaa

SEQ ID NO: 36757 - DNA, 22 bp, Artificial Sequence
  chemically synthesized
ttaccttagtaaactgccaatt

SEQ ID NO: 36758 - DNA, 22 bp, Artificial Sequence
  chemically synthesized
accttagtaaactgccaatttt

SEQ ID NO: 36759 - DNA, 22 bp, Artificial Sequence
  chemically synthesized
ccttagtaaactgccaattttc

SEQ ID NO: 36760 - DNA, 22 bp, Artificial Sequence
  chemically synthesized
agtaaactgccaattttctgaa

SEQ ID NO: 36761 - DNA, 22 bp, Artificial Sequence
  chemically synthesized
gtaaactgccaattttctgaaa

SEQ ID NO: 36762 - DNA, 22 bp, Artificial Sequence
  chemically synthesized
ccaattttctgaaatgctcttt

SEQ ID NO: 36763 - DNA, 22 bp, Artificial Sequence
  chemically synthesized
tctgaaatgctctttaaatcct

SEQ ID NO: 36764 - DNA, 22 bp, Artificial Sequence
  chemically synthesized
ctgaaatgctctttaaatcctg

SEQ ID NO: 36765 - DNA, 22 bp, Artificial Sequence
  chemically synthesized
tgaaatgctctttaaatcctgc

SEQ ID NO: 36766 - DNA, 22 bp, Artificial Sequence
  chemically synthesized
aaatgctctttaaatcctgcta

SEQ ID NO: 36767 - DNA, 22 bp, Artificial Sequence
  chemically synthesized
tttaaatcctgctaatggtggc

SEQ ID NO: 36768 - DNA, 22 bp, Artificial Sequence
  chemically synthesized
taaatcctgctaatggtggcat

SEQ ID NO: 36769 - DNA, 22 bp, Artificial Sequence
  chemically synthesized
aaatcctgctaatggtggcatt

SEQ ID NO: 36770 - DNA, 22 bp, Artificial Sequence
  chemically synthesized
aatcctgctaatggtggcattt

SEQ ID NO: 36771 - DNA, 22 bp, Artificial Sequence
  chemically synthesized
ctaatggtggcatttgtgtctt

SEQ ID NO: 36772 - DNA, 22 bp, Artificial Sequence
  chemically synthesized
atggtggcatttgtgtctttgt

SEQ ID NO: 36773 - DNA, 22 bp, Artificial Sequence
  chemically synthesized
gtgtctttgtcacctacagtac

SEQ ID NO: 36774 - DNA, 22 bp, Artificial Sequence
  chemically synthesized
tgtctttgtcacctacagtaca

SEQ ID NO: 36775 - DNA, 22 bp, Artificial Sequence
  chemically synthesized
tgtcacctacagtacatttctg

SEQ ID NO: 36776 - DNA, 22 bp, Artificial Sequence
  chemically synthesized
gtcacctacagtacatttctgg

SEQ ID NO: 36777 - DNA, 22 bp, Artificial Sequence
  chemically synthesized
tcacctacagtacatttctgga

SEQ ID NO: 36778 - DNA, 22 bp, Artificial Sequence
  chemically synthesized
cagtacatttctggatttggga

SEQ ID NO: 36779 - DNA, 22 bp, Artificial Sequence
  chemically synthesized
ctggatttgggaatgagtgttc

SEQ ID NO: 36780 - DNA, 22 bp, Artificial Sequence
  chemically synthesized
tggatttgggaatgagtgttct

SEQ ID NO: 36781 - DNA, 22 bp, Artificial Sequence
  chemically synthesized
gatttgggaatgagtgttcttc

SEQ ID NO: 36782 - DNA, 22 bp, Artificial Sequence
  chemically synthesized
gggaatgagtgttcttcagagg

SEQ ID NO: 36783 - DNA, 22 bp, Artificial Sequence
  chemically synthesized
ggaatgagtgttcttcagagga

SEQ ID NO: 36784 - DNA, 22 bp, Artificial Sequence
  chemically synthesized
ttcagaggatcctcgctgccca

SEQ ID NO: 36785 - DNA, 22 bp, Artificial Sequence
  chemically synthesized
cagaggatcctcgctgcccagg

SEQ ID NO: 36786 - DNA, 22 bp, Artificial Sequence
  chemically synthesized
agaggatcctcgctgcccaggt

SEQ ID NO: 36787 - DNA, 22 bp, Artificial Sequence
  chemically synthesized
gctgcccaggttccctgccaga

SEQ ID NO: 36788 - DNA, 22 bp, Artificial Sequence
  chemically synthesized
cccaggttccctgccagaagga

SEQ ID NO: 36789 - DNA, 20 bp, Artificial Sequence
  chemically synthesized
ctccttttgccacaccctca

SEQ ID NO: 36790 - DNA, 20 bp, Artificial Sequence
  chemically synthesized
acaccctcacagacataacc

SEQ ID NO: 36791 - DNA, 20 bp, Artificial Sequence
  chemically synthesized
ttgcatctttcaatccaatc

SEQ ID NO: 36792 - DNA, 20 bp, Artificial Sequence
  chemically synthesized
tttcaatccaatcaagttga

SEQ ID NO: 36793 - DNA, 20 bp, Artificial Sequence
  chemically synthesized
ttgacagtattaaccatcac

SEQ ID NO: 36794 - DNA, 20 bp, Artificial Sequence
  chemically synthesized
tcatacataatcttcaaata

SEQ ID NO: 36795 - DNA, 20 bp, Artificial Sequence
  chemically synthesized
cttcaaataaagacaataat

SEQ ID NO: 36796 - DNA, 20 bp, Artificial Sequence
  chemically synthesized
ttcaaataaagacaataata

SEQ ID NO: 36797 - DNA, 20 bp, Artificial Sequence
  chemically synthesized
tacaactatcctcatacaac

SEQ ID NO: 36798 - DNA, 20 bp, Artificial Sequence
  chemically synthesized
cgcaccaatccccaaaccaa

SEQ ID NO: 36799 - DNA, 20 bp, Artificial Sequence
  chemically synthesized
caaaccaaaagttattacat

SEQ ID NO: 36800 - DNA, 20 bp, Artificial Sequence
  chemically synthesized
aaaccaaaagttattacata

SEQ ID NO: 36801 - DNA, 20 bp, Artificial Sequence
  chemically synthesized
aatgcttaaatgctgatgtg

SEQ ID NO: 36802 - DNA, 20 bp, Artificial Sequence
  chemically synthesized
gatgtgaagtccataaatct

SEQ ID NO: 36803 - DNA, 20 bp, Artificial Sequence
  chemically synthesized
atgtgaagtccataaatcta

SEQ ID NO: 36804 - DNA, 20 bp, Artificial Sequence
  chemically synthesized
aaatctaaggtcacatgata

SEQ ID NO: 36805 - DNA, 20 bp, Artificial Sequence
  chemically synthesized
aatctaaggtcacatgataa

SEQ ID NO: 36806 - DNA, 20 bp, Artificial Sequence
  chemically synthesized
cacatgataaaggaaaaata

SEQ ID NO: 36807 - DNA, 20 bp, Artificial Sequence
  chemically synthesized
acatgataaaggaaaaataa

SEQ ID NO: 36808 - DNA, 20 bp, Artificial Sequence
  chemically synthesized
aaaataaaggaaataaaata

SEQ ID NO: 36809 - DNA, 20 bp, Artificial Sequence
  chemically synthesized
ataaaataaagatattttct

SEQ ID NO: 36810 - DNA, 20 bp, Artificial Sequence
  chemically synthesized
taaagatattttcttagcac

SEQ ID NO: 36811 - DNA, 20 bp, Artificial Sequence
  chemically synthesized
cacaagtgtacacatgcatt

SEQ ID NO: 36812 - DNA, 20 bp, Artificial Sequence
  chemically synthesized
agtgtacacatgcatttaga

SEQ ID NO: 36813 - DNA, 20 bp, Artificial Sequence
  chemically synthesized
gtacacatgcatttagaaag

SEQ ID NO: 36814 - DNA, 20 bp, Artificial Sequence
  chemically synthesized
atgcatttagaaagtggata

SEQ ID NO: 36815 - DNA, 20 bp, Artificial Sequence
  chemically synthesized
agaaagtggatatagtgctg

SEQ ID NO: 36816 - DNA, 20 bp, Artificial Sequence
  chemically synthesized
gtgctgcagctgtccacttt

SEQ ID NO: 36817 - DNA, 20 bp, Artificial Sequence
  chemically synthesized
tgctgcagctgtccactttc

SEQ ID NO: 36818 - DNA, 20 bp, Artificial Sequence
  chemically synthesized
tgcagctgtccactttcggg

SEQ ID NO: 36819 - DNA, 20 bp, Artificial Sequence
  chemically synthesized
ggtggtgcctgcatatcgtg

SEQ ID NO: 36820 - DNA, 20 bp, Artificial Sequence
  chemically synthesized
gtgcagaaccatctatgaac

SEQ ID NO: 36821 - DNA, 20 bp, Artificial Sequence
  chemically synthesized
accatctatgaaccagtcct

SEQ ID NO: 36822 - DNA, 20 bp, Artificial Sequence
  chemically synthesized
cttcctctgtcaactgatca

SEQ ID NO: 36823 - DNA, 20 bp, Artificial Sequence
  chemically synthesized
ttcctctgtcaactgatcat

SEQ ID NO: 36824 - DNA, 20 bp, Artificial Sequence
  chemically synthesized
tcctctgtcaactgatcata

SEQ ID NO: 36825 - DNA, 20 bp, Artificial Sequence
  chemically synthesized
gatcatagggaactccccat

SEQ ID NO: 36826 - DNA, 20 bp, Artificial Sequence
  chemically synthesized
atcatagggaactccccatg

SEQ ID NO: 36827 - DNA, 20 bp, Artificial Sequence
  chemically synthesized
ggaactccccatgaggccat

SEQ ID NO: 36828 - DNA, 20 bp, Artificial Sequence
  chemically synthesized
tccccatgaggccattggtg

SEQ ID NO: 36829 - DNA, 20 bp, Artificial Sequence
  chemically synthesized
ccccatgaggccattggtgc

SEQ ID NO: 36830 - DNA, 20 bp, Artificial Sequence
  chemically synthesized
atgaggccattggtgcaggc

SEQ ID NO: 36831 - DNA, 20 bp, Artificial Sequence
  chemically synthesized
tgaggccattggtgcaggct

SEQ ID NO: 36832 - DNA, 20 bp, Artificial Sequence
  chemically synthesized
gaggccattggtgcaggctg

SEQ ID NO: 36833 - DNA, 20 bp, Artificial Sequence
  chemically synthesized
aggccattggtgcaggctgg

SEQ ID NO: 36834 - DNA, 20 bp, Artificial Sequence
  chemically synthesized
gccattggtgcaggctgggg

SEQ ID NO: 36835 - DNA, 20 bp, Artificial Sequence
  chemically synthesized
ccattggtgcaggctggggg

SEQ ID NO: 36836 - DNA, 20 bp, Artificial Sequence
  chemically synthesized
cattggtgcaggctggggga

SEQ ID NO: 36837 - DNA, 20 bp, Artificial Sequence
  chemically synthesized
tggtgcaggctgggggaggg

SEQ ID NO: 36838 - DNA, 20 bp, Artificial Sequence
  chemically synthesized
ggtgcaggctgggggaggga

SEQ ID NO: 36839 - DNA, 20 bp, Artificial Sequence
  chemically synthesized
gcaggctgggggagggaagg

SEQ ID NO: 36840 - DNA, 20 bp, Artificial Sequence
  chemically synthesized
caggctgggggagggaaggc

SEQ ID NO: 36841 - DNA, 20 bp, Artificial Sequence
  chemically synthesized
aggctgggggagggaaggca

SEQ ID NO: 36842 - DNA, 20 bp, Artificial Sequence
  chemically synthesized
ctgggggagggaaggcaggg

SEQ ID NO: 36843 - DNA, 20 bp, Artificial Sequence
  chemically synthesized
gagggaaggcagggtggcat

SEQ ID NO: 36844 - DNA, 20 bp, Artificial Sequence
  chemically synthesized
ggaaggcagggtggcatgag

SEQ ID NO: 36845 - DNA, 20 bp, Artificial Sequence
  chemically synthesized
aaggcagggtggcatgagtg

SEQ ID NO: 36846 - DNA, 20 bp, Artificial Sequence
  chemically synthesized
ggtggcatgagtggagaaca

SEQ ID NO: 36847 - DNA, 20 bp, Artificial Sequence
  chemically synthesized
gtggcatgagtggagaacat

SEQ ID NO: 36848 - DNA, 20 bp, Artificial Sequence
  chemically synthesized
agtggagaacatgggcattt

SEQ ID NO: 36849 - DNA, 20 bp, Artificial Sequence
  chemically synthesized
atgtaacttacttgtgcctt

SEQ ID NO: 36850 - DNA, 20 bp, Artificial Sequence
  chemically synthesized
tgtaacttacttgtgccttc

SEQ ID NO: 36851 - DNA, 20 bp, Artificial Sequence
  chemically synthesized
tgtgccttcaggacctgctc

SEQ ID NO: 36852 - DNA, 20 bp, Artificial Sequence
  chemically synthesized
cgctgtgctgacccacttca

SEQ ID NO: 36853 - DNA, 20 bp, Artificial Sequence
  chemically synthesized
gtgctgacccacttcatggc

SEQ ID NO: 36854 - DNA, 20 bp, Artificial Sequence
  chemically synthesized
tgacccacttcatggctaga

SEQ ID NO: 36855 - DNA, 20 bp, Artificial Sequence
  chemically synthesized
gacccacttcatggctagat

SEQ ID NO: 36856 - DNA, 20 bp, Artificial Sequence
  chemically synthesized
cacttcatggctagatgggt

SEQ ID NO: 36857 - DNA, 20 bp, Artificial Sequence
  chemically synthesized
tcatggctagatgggtcaga

SEQ ID NO: 36858 - DNA, 20 bp, Artificial Sequence
  chemically synthesized
tagatgggtcagaaagcaac

SEQ ID NO: 36859 - DNA, 20 bp, Artificial Sequence
  chemically synthesized
agaaagcaaccagttcatga

SEQ ID NO: 36860 - DNA, 20 bp, Artificial Sequence
  chemically synthesized
gaaagcaaccagttcatgat

SEQ ID NO: 36861 - DNA, 20 bp, Artificial Sequence
  chemically synthesized
agcaaccagttcatgatagg

SEQ ID NO: 36862 - DNA, 20 bp, Artificial Sequence
  chemically synthesized
gcaaccagttcatgataggc

SEQ ID NO: 36863 - DNA, 20 bp, Artificial Sequence
  chemically synthesized
cagttcatgataggcaggtt

SEQ ID NO: 36864 - DNA, 20 bp, Artificial Sequence
  chemically synthesized
agttcatgataggcaggttc

SEQ ID NO: 36865 - DNA, 20 bp, Artificial Sequence
  chemically synthesized
tcatgataggcaggttcagg

SEQ ID NO: 36866 - DNA, 20 bp, Artificial Sequence
  chemically synthesized
ataggcaggttcaggtagca

SEQ ID NO: 36867 - DNA, 20 bp, Artificial Sequence
  chemically synthesized
catggtgactttatgaccca

SEQ ID NO: 36868 - DNA, 20 bp, Artificial Sequence
  chemically synthesized
atgacccacagtcaaacgtt

SEQ ID NO: 36869 - DNA, 20 bp, Artificial Sequence
  chemically synthesized
caaacgttcagttaccacca

SEQ ID NO: 36870 - DNA, 20 bp, Artificial Sequence
  chemically synthesized
ttaccaccaaagcccaataa

SEQ ID NO: 36871 - DNA, 20 bp, Artificial Sequence
  chemically synthesized
aaagcccaataacagaccaa

SEQ ID NO: 36872 - DNA, 20 bp, Artificial Sequence
  chemically synthesized
gaccaatagctgtctctcaa

SEQ ID NO: 36873 - DNA, 20 bp, Artificial Sequence
  chemically synthesized
accaatagctgtctctcaaa

SEQ ID NO: 36874 - DNA, 20 bp, Artificial Sequence
  chemically synthesized
caatagctgtctctcaaaag

SEQ ID NO: 36875 - DNA, 20 bp, Artificial Sequence
  chemically synthesized
atagctgtctctcaaaagga

SEQ ID NO: 36876 - DNA, 20 bp, Artificial Sequence
  chemically synthesized
gctgtctctcaaaaggagag

SEQ ID NO: 36877 - DNA, 20 bp, Artificial Sequence
  chemically synthesized
aaaaggagagtagttatctg

SEQ ID NO: 36878 - DNA, 20 bp, Artificial Sequence
  chemically synthesized
aggagagtagttatctgcag

SEQ ID NO: 36879 - DNA, 20 bp, Artificial Sequence
  chemically synthesized
agagtagttatctgcagaag

SEQ ID NO: 36880 - DNA, 20 bp, Artificial Sequence
  chemically synthesized
gtagttatctgcagaagtgg

SEQ ID NO: 36881 - DNA, 20 bp, Artificial Sequence
  chemically synthesized
tagttatctgcagaagtggc

SEQ ID NO: 36882 - DNA, 20 bp, Artificial Sequence
  chemically synthesized
agttatctgcagaagtggca

SEQ ID NO: 36883 - DNA, 20 bp, Artificial Sequence
  chemically synthesized
agggccttgctccaaaatcc

SEQ ID NO: 36884 - DNA, 20 bp, Artificial Sequence
  chemically synthesized
ggccttgctccaaaatccta

SEQ ID NO: 36885 - DNA, 20 bp, Artificial Sequence
  chemically synthesized
gccttgctccaaaatcctag

SEQ ID NO: 36886 - DNA, 20 bp, Artificial Sequence
  chemically synthesized
tctccactgtgattcaccta

SEQ ID NO: 36887 - DNA, 20 bp, Artificial Sequence
  chemically synthesized
ctccactgtgattcacctat

SEQ ID NO: 36888 - DNA, 20 bp, Artificial Sequence
  chemically synthesized
tccactgtgattcacctatg

SEQ ID NO: 36889 - DNA, 20 bp, Artificial Sequence
  chemically synthesized
ccactgtgattcacctatgg

SEQ ID NO: 36890 - DNA, 20 bp, Artificial Sequence
  chemically synthesized
tcacctatgggggcctgcca

SEQ ID NO: 36891 - DNA, 20 bp, Artificial Sequence
  chemically synthesized
cacctatgggggcctgccaa

SEQ ID NO: 36892 - DNA, 20 bp, Artificial Sequence
  chemically synthesized
ggcctgccaaaggctccaaa

SEQ ID NO: 36893 - DNA, 20 bp, Artificial Sequence
  chemically synthesized
ctatctgccactgacacctc

SEQ ID NO: 36894 - DNA, 20 bp, Artificial Sequence
  chemically synthesized
actgacacctcaagcaccat

SEQ ID NO: 36895 - DNA, 20 bp, Artificial Sequence
  chemically synthesized
ctcaagcaccattggatctg

SEQ ID NO: 36896 - DNA, 20 bp, Artificial Sequence
  chemically synthesized
tcaagcaccattggatctgc

SEQ ID NO: 36897 - DNA, 20 bp, Artificial Sequence
  chemically synthesized
caagcaccattggatctgcg

SEQ ID NO: 36898 - DNA, 20 bp, Artificial Sequence
  chemically synthesized
attggatctgcggggtcatg

SEQ ID NO: 36899 - DNA, 20 bp, Artificial Sequence
  chemically synthesized
gcggggtcatgtggcccaaa

SEQ ID NO: 36900 - DNA, 20 bp, Artificial Sequence
  chemically synthesized
gggtcatgtggcccaaatgg

SEQ ID NO: 36901 - DNA, 20 bp, Artificial Sequence
  chemically synthesized
gtcatgtggcccaaatggca

SEQ ID NO: 36902 - DNA, 20 bp, Artificial Sequence
  chemically synthesized
atgtggcccaaatggcagag

SEQ ID NO: 36903 - DNA, 20 bp, Artificial Sequence
  chemically synthesized
aaatggcagagcagctttca

SEQ ID NO: 36904 - DNA, 20 bp, Artificial Sequence
  chemically synthesized
tggcagagcagctttcacag

SEQ ID NO: 36905 - DNA, 20 bp, Artificial Sequence
  chemically synthesized
gagcagctttcacagcagcc

SEQ ID NO: 36906 - DNA, 20 bp, Artificial Sequence
  chemically synthesized
acagcagcctggacctgttt

SEQ ID NO: 36907 - DNA, 20 bp, Artificial Sequence
  chemically synthesized
agcagcctggacctgtttca

SEQ ID NO: 36908 - DNA, 20 bp, Artificial Sequence
  chemically synthesized
ttcagagccttcttttgttc

SEQ ID NO: 36909 - DNA, 20 bp, Artificial Sequence
  chemically synthesized
ttctagactgcacttaaatc

SEQ ID NO: 36910 - DNA, 20 bp, Artificial Sequence
  chemically synthesized
tagactgcacttaaatctgg

SEQ ID NO: 36911 - DNA, 20 bp, Artificial Sequence
  chemically synthesized
acttaaatctggcagccttt

SEQ ID NO: 36912 - DNA, 20 bp, Artificial Sequence
  chemically synthesized
cttaaatctggcagcctttc

SEQ ID NO: 36913 - DNA, 20 bp, Artificial Sequence
  chemically synthesized
ctttcaggtcactcgataaa

SEQ ID NO: 36914 - DNA, 20 bp, Artificial Sequence
  chemically synthesized
tttcaggtcactcgataaat

SEQ ID NO: 36915 - DNA, 20 bp, Artificial Sequence
  chemically synthesized
aggtcactcgataaatgggc

SEQ ID NO: 36916 - DNA, 20 bp, Artificial Sequence
  chemically synthesized
gtcactcgataaatgggcca

SEQ ID NO: 36917 - DNA, 20 bp, Artificial Sequence
  chemically synthesized
ccagagtaacacacccaaac

SEQ ID NO: 36918 - DNA, 20 bp, Artificial Sequence
  chemically synthesized
cagagtaacacacccaaacg

SEQ ID NO: 36919 - DNA, 20 bp, Artificial Sequence
  chemically synthesized
tgttgcctccaaaatccaaa

SEQ ID NO: 36920 - DNA, 20 bp, Artificial Sequence
  chemically synthesized
gttgcctccaaaatccaaat

SEQ ID NO: 36921 - DNA, 20 bp, Artificial Sequence
  chemically synthesized
caaaatccaaataggcccac

SEQ ID NO: 36922 - DNA, 20 bp, Artificial Sequence
  chemically synthesized
aaaatccaaataggcccacc

SEQ ID NO: 36923 - DNA, 20 bp, Artificial Sequence
  chemically synthesized
caggcattgtgcctctttct

SEQ ID NO: 36924 - DNA, 20 bp, Artificial Sequence
  chemically synthesized
tgtgcctctttcttggttgt

SEQ ID NO: 36925 - DNA, 20 bp, Artificial Sequence
  chemically synthesized
tgcctctttcttggttgtaa

SEQ ID NO: 36926 - DNA, 20 bp, Artificial Sequence
  chemically synthesized
gcctctttcttggttgtaag

SEQ ID NO: 36927 - DNA, 20 bp, Artificial Sequence
  chemically synthesized
cctctttcttggttgtaaga

SEQ ID NO: 36928 - DNA, 20 bp, Artificial Sequence
  chemically synthesized
ctctttcttggttgtaagag

SEQ ID NO: 36929 - DNA, 20 bp, Artificial Sequence
  chemically synthesized
gttgtaagaggggccaaacg

SEQ ID NO: 36930 - DNA, 20 bp, Artificial Sequence
  chemically synthesized
taagaggggccaaacgcagc

SEQ ID NO: 36931 - DNA, 20 bp, Artificial Sequence
  chemically synthesized
cagcaagttatgcttcacct

SEQ ID NO: 36932 - DNA, 20 bp, Artificial Sequence
  chemically synthesized
caagttatgcttcaccttag

SEQ ID NO: 36933 - DNA, 20 bp, Artificial Sequence
  chemically synthesized
aagttatgcttcaccttaga

SEQ ID NO: 36934 - DNA, 20 bp, Artificial Sequence
  chemically synthesized
ccttagaaggaatatctcca

SEQ ID NO: 36935 - DNA, 20 bp, Artificial Sequence
  chemically synthesized
cttagaaggaatatctccat

SEQ ID NO: 36936 - DNA, 20 bp, Artificial Sequence
  chemically synthesized
ctccataggtctcatgccac

SEQ ID NO: 36937 - DNA, 20 bp, Artificial Sequence
  chemically synthesized
gtctcatgccactggaaccc

SEQ ID NO: 36938 - DNA, 20 bp, Artificial Sequence
  chemically synthesized
ggaaccctagaaattttacc

SEQ ID NO: 36939 - DNA, 20 bp, Artificial Sequence
  chemically synthesized
gaaccctagaaattttaccg

SEQ ID NO: 36940 - DNA, 20 bp, Artificial Sequence
  chemically synthesized
ccctagaaattttaccgagg

SEQ ID NO: 36941 - DNA, 20 bp, Artificial Sequence
  chemically synthesized
agaaattttaccgaggtaga

SEQ ID NO: 36942 - DNA, 20 bp, Artificial Sequence
  chemically synthesized
ggtagaaagtccctaaattt

SEQ ID NO: 36943 - DNA, 20 bp, Artificial Sequence
  chemically synthesized
gaaagtccctaaattttagc

SEQ ID NO: 36944 - DNA, 20 bp, Artificial Sequence
  chemically synthesized
tggatttatttcccatcctc

SEQ ID NO: 36945 - DNA, 20 bp, Artificial Sequence
  chemically synthesized
catacaaatgtctcaccaat

SEQ ID NO: 36946 - DNA, 20 bp, Artificial Sequence
  chemically synthesized
aaatgtctcaccaataagtt

SEQ ID NO: 36947 - DNA, 20 bp, Artificial Sequence
  chemically synthesized
tcataatgtcatgaatgtaa

SEQ ID NO: 36948 - DNA, 20 bp, Artificial Sequence
  chemically synthesized
atgtcatgaatgtaatggac

SEQ ID NO: 36949 - DNA, 20 bp, Artificial Sequence
  chemically synthesized
tggaccagtgttatatctcg

SEQ ID NO: 36950 - DNA, 20 bp, Artificial Sequence
  chemically synthesized
accagtgttatatctcgtgg

SEQ ID NO: 36951 - DNA, 20 bp, Artificial Sequence
  chemically synthesized
ttatatctcgtggaagtgaa

SEQ ID NO: 36952 - DNA, 20 bp, Artificial Sequence
  chemically synthesized
atctcgtggaagtgaaaagc

SEQ ID NO: 36953 - DNA, 20 bp, Artificial Sequence
  chemically synthesized
cgtggaagtgaaaagcgagc

SEQ ID NO: 36954 - DNA, 20 bp, Artificial Sequence
  chemically synthesized
gtggaagtgaaaagcgagca

SEQ ID NO: 36955 - DNA, 20 bp, Artificial Sequence
  chemically synthesized
cgagcaaggtctctccaaat

SEQ ID NO: 36956 - DNA, 20 bp, Artificial Sequence
  chemically synthesized
ccaaataagattatgacaca

SEQ ID NO: 36957 - DNA, 20 bp, Artificial Sequence
  chemically synthesized
ataagattatgacacaaagc

SEQ ID NO: 36958 - DNA, 20 bp, Artificial Sequence
  chemically synthesized
aagattatgacacaaagctg

SEQ ID NO: 36959 - DNA, 20 bp, Artificial Sequence
  chemically synthesized
gattatgacacaaagctgga

SEQ ID NO: 36960 - DNA, 20 bp, Artificial Sequence
  chemically synthesized
tggagagttgatacacccct

SEQ ID NO: 36961 - DNA, 20 bp, Artificial Sequence
  chemically synthesized
ggagagttgatacacccctg

SEQ ID NO: 36962 - DNA, 20 bp, Artificial Sequence
  chemically synthesized
gagttgatacacccctgagg

SEQ ID NO: 36963 - DNA, 20 bp, Artificial Sequence
  chemically synthesized
agttgatacacccctgaggt

SEQ ID NO: 36964 - DNA, 20 bp, Artificial Sequence
  chemically synthesized
gttgatacacccctgaggta

SEQ ID NO: 36965 - DNA, 20 bp, Artificial Sequence
  chemically synthesized
gatacacccctgaggtaggg

SEQ ID NO: 36966 - DNA, 20 bp, Artificial Sequence
  chemically synthesized
acccctgaggtagggtggta

SEQ ID NO: 36967 - DNA, 20 bp, Artificial Sequence
  chemically synthesized
cccctgaggtagggtggtaa

SEQ ID NO: 36968 - DNA, 20 bp, Artificial Sequence
  chemically synthesized
gggtggtaaaggtataatgc

SEQ ID NO: 36969 - DNA, 20 bp, Artificial Sequence
  chemically synthesized
aggtataatgctggccttgt

SEQ ID NO: 36970 - DNA, 20 bp, Artificial Sequence
  chemically synthesized
aatgctggccttgtcagctg

SEQ ID NO: 36971 - DNA, 20 bp, Artificial Sequence
  chemically synthesized
atgctggccttgtcagctga

SEQ ID NO: 36972 - DNA, 20 bp, Artificial Sequence
  chemically synthesized
agctgaaggcaaattgcttc

SEQ ID NO: 36973 - DNA, 20 bp, Artificial Sequence
  chemically synthesized
tgaaggcaaattgcttctgg

SEQ ID NO: 36974 - DNA, 20 bp, Artificial Sequence
  chemically synthesized
gaaggcaaattgcttctggt

SEQ ID NO: 36975 - DNA, 20 bp, Artificial Sequence
  chemically synthesized
attgcttctggtgggtctta

SEQ ID NO: 36976 - DNA, 20 bp, Artificial Sequence
  chemically synthesized
cttctggtgggtcttatgga

SEQ ID NO: 36977 - DNA, 20 bp, Artificial Sequence
  chemically synthesized
ttctggtgggtcttatggac

SEQ ID NO: 36978 - DNA, 20 bp, Artificial Sequence
  chemically synthesized
gtgggtcttatggacaggaa

SEQ ID NO: 36979 - DNA, 20 bp, Artificial Sequence
  chemically synthesized
gggtcttatggacaggaatg

SEQ ID NO: 36980 - DNA, 20 bp, Artificial Sequence
  chemically synthesized
tatggacaggaatggagaaa

SEQ ID NO: 36981 - DNA, 20 bp, Artificial Sequence
  chemically synthesized
tggagaaaaagccacttgcc

SEQ ID NO: 36982 - DNA, 20 bp, Artificial Sequence
  chemically synthesized
aaagccacttgccaagccaa

SEQ ID NO: 36983 - DNA, 20 bp, Artificial Sequence
  chemically synthesized
ccaagccaatggctgcatac

SEQ ID NO: 36984 - DNA, 20 bp, Artificial Sequence
  chemically synthesized
caagccaatggctgcatacc

SEQ ID NO: 36985 - DNA, 20 bp, Artificial Sequence
  chemically synthesized
aatggctgcataccaggcac

SEQ ID NO: 36986 - DNA, 20 bp, Artificial Sequence
  chemically synthesized
atggctgcataccaggcacc

SEQ ID NO: 36987 - DNA, 20 bp, Artificial Sequence
  chemically synthesized
ggctgcataccaggcaccag

SEQ ID NO: 36988 - DNA, 20 bp, Artificial Sequence
  chemically synthesized
ggagatgtgttaatttgctc

SEQ ID NO: 36989 - DNA, 20 bp, Artificial Sequence
  chemically synthesized
tcaagcaacaaaaccacaac

SEQ ID NO: 36990 - DNA, 20 bp, Artificial Sequence
  chemically synthesized
agcaacaaaaccacaactgg

SEQ ID NO: 36991 - DNA, 20 bp, Artificial Sequence
  chemically synthesized
caacaaaaccacaactggta

SEQ ID NO: 36992 - DNA, 20 bp, Artificial Sequence
  chemically synthesized
caaaaccacaactggtagag

SEQ ID NO: 36993 - DNA, 20 bp, Artificial Sequence
  chemically synthesized
actggtagagcagctgcaat

SEQ ID NO: 36994 - DNA, 20 bp, Artificial Sequence
  chemically synthesized
tggtagagcagctgcaattg

SEQ ID NO: 36995 - DNA, 20 bp, Artificial Sequence
  chemically synthesized
ctgcaattggagtcaccact

SEQ ID NO: 36996 - DNA, 20 bp, Artificial Sequence
  chemically synthesized
attggagtcaccacttggtt

SEQ ID NO: 36997 - DNA, 20 bp, Artificial Sequence
  chemically synthesized
ataatccaccatcattttcc

SEQ ID NO: 36998 - DNA, 20 bp, Artificial Sequence
  chemically synthesized
agatccatctgtcctctgca

SEQ ID NO: 36999 - DNA, 20 bp, Artificial Sequence
  chemically synthesized
gatccatctgtcctctgcac

SEQ ID NO: 37000 - DNA, 20 bp, Artificial Sequence
  chemically synthesized
tgtcctctgcacaggtcaaa

SEQ ID NO: 37001 - DNA, 20 bp, Artificial Sequence
  chemically synthesized
gtcctctgcacaggtcaaat

SEQ ID NO: 37002 - DNA, 20 bp, Artificial Sequence
  chemically synthesized
cctctgcacaggtcaaatgg

SEQ ID NO: 37003 - DNA, 20 bp, Artificial Sequence
  chemically synthesized
tctgcacaggtcaaatggga

SEQ ID NO: 37004 - DNA, 20 bp, Artificial Sequence
  chemically synthesized
ggtcaaatgggagagttgaa

SEQ ID NO: 37005 - DNA, 20 bp, Artificial Sequence
  chemically synthesized
gtcaaatgggagagttgaac

SEQ ID NO: 37006 - DNA, 20 bp, Artificial Sequence
  chemically synthesized
tcaaatgggagagttgaaca

SEQ ID NO: 37007 - DNA, 20 bp, Artificial Sequence
  chemically synthesized
gggagagttgaacagggatg

SEQ ID NO: 37008 - DNA, 20 bp, Artificial Sequence
  chemically synthesized
agagttgaacagggatgtgg

SEQ ID NO: 37009 - DNA, 20 bp, Artificial Sequence
  chemically synthesized
gagttgaacagggatgtggt

SEQ ID NO: 37010 - DNA, 20 bp, Artificial Sequence
  chemically synthesized
tcaccacccctgcgtctttc

SEQ ID NO: 37011 - DNA, 20 bp, Artificial Sequence
  chemically synthesized
tgcgtctttcaagtccttga

SEQ ID NO: 37012 - DNA, 20 bp, Artificial Sequence
  chemically synthesized
gatggtgacactaatcactt

SEQ ID NO: 37013 - DNA, 20 bp, Artificial Sequence
  chemically synthesized
actaatcacttcagtccctc

SEQ ID NO: 37014 - DNA, 20 bp, Artificial Sequence
  chemically synthesized
ctaatcacttcagtccctcc

SEQ ID NO: 37015 - DNA, 20 bp, Artificial Sequence
  chemically synthesized
taatcacttcagtccctcca

SEQ ID NO: 37016 - DNA, 20 bp, Artificial Sequence
  chemically synthesized
cacttcagtccctccaggga

SEQ ID NO: 37017 - DNA, 20 bp, Artificial Sequence
  chemically synthesized
acttcagtccctccagggat

SEQ ID NO: 37018 - DNA, 20 bp, Artificial Sequence
  chemically synthesized
ttttgatttttttatttttc

SEQ ID NO: 37019 - DNA, 20 bp, Artificial Sequence
  chemically synthesized
tttgatttttttatttttct

SEQ ID NO: 37020 - DNA, 20 bp, Artificial Sequence
  chemically synthesized
gatttttttatttttctagg

SEQ ID NO: 37021 - DNA, 20 bp, Artificial Sequence
  chemically synthesized
tttttttatttttctaggta

SEQ ID NO: 37022 - DNA, 20 bp, Artificial Sequence
  chemically synthesized
tttatttttctaggtagaga

SEQ ID NO: 37023 - DNA, 20 bp, Artificial Sequence
  chemically synthesized
ctaggtagagacagctctaa

SEQ ID NO: 37024 - DNA, 20 bp, Artificial Sequence
  chemically synthesized
cagctctaatggcttctgtt

SEQ ID NO: 37025 - DNA, 20 bp, Artificial Sequence
  chemically synthesized
tttggcctttcccaccataa

SEQ ID NO: 37026 - DNA, 20 bp, Artificial Sequence
  chemically synthesized
cataatagccctcatcctac

SEQ ID NO: 37027 - DNA, 20 bp, Artificial Sequence
  chemically synthesized
atagccctcatcctaccagt

SEQ ID NO: 37028 - DNA, 20 bp, Artificial Sequence
  chemically synthesized
tagccctcatcctaccagtc

SEQ ID NO: 37029 - DNA, 20 bp, Artificial Sequence
  chemically synthesized
agccctcatcctaccagtca

SEQ ID NO: 37030 - DNA, 20 bp, Artificial Sequence
  chemically synthesized
ccctcatcctaccagtcagg

SEQ ID NO: 37031 - DNA, 20 bp, Artificial Sequence
  chemically synthesized
taccagtcagggagccaatg

SEQ ID NO: 37032 - DNA, 20 bp, Artificial Sequence
  chemically synthesized
agccaatgtggcatttctgc

SEQ ID NO: 37033 - DNA, 20 bp, Artificial Sequence
  chemically synthesized
tggcatttctgccagctaat

SEQ ID NO: 37034 - DNA, 20 bp, Artificial Sequence
  chemically synthesized
tctatacaaattatgcattt

SEQ ID NO: 37035 - DNA, 20 bp, Artificial Sequence
  chemically synthesized
caaattatgcattttggcac

SEQ ID NO: 37036 - DNA, 20 bp, Artificial Sequence
  chemically synthesized
aaattatgcattttggcact

SEQ ID NO: 37037 - DNA, 20 bp, Artificial Sequence
  chemically synthesized
tttggcactgggaaaatgac

SEQ ID NO: 37038 - DNA, 20 bp, Artificial Sequence
  chemically synthesized
tggcactgggaaaatgacca

SEQ ID NO: 37039 - DNA, 20 bp, Artificial Sequence
  chemically synthesized
ggcactgggaaaatgaccag

SEQ ID NO: 37040 - DNA, 20 bp, Artificial Sequence
  chemically synthesized
tgggaaaatgaccagaggat

SEQ ID NO: 37041 - DNA, 20 bp, Artificial Sequence
  chemically synthesized
aaatgaccagaggataagtc

SEQ ID NO: 37042 - DNA, 20 bp, Artificial Sequence
  chemically synthesized
aatgaccagaggataagtcc

SEQ ID NO: 37043 - DNA, 20 bp, Artificial Sequence
  chemically synthesized
atgaccagaggataagtcca

SEQ ID NO: 37044 - DNA, 20 bp, Artificial Sequence
  chemically synthesized
ggataagtccagggacccac

SEQ ID NO: 37045 - DNA, 20 bp, Artificial Sequence
  chemically synthesized
ggacccactggaaccactgt

SEQ ID NO: 37046 - DNA, 20 bp, Artificial Sequence
  chemically synthesized
ccactggaaccactgtaagt

SEQ ID NO: 37047 - DNA, 20 bp, Artificial Sequence
  chemically synthesized
aaccactgtaagtcagaaat

SEQ ID NO: 37048 - DNA, 20 bp, Artificial Sequence
  chemically synthesized
attaattacctaacctccat

SEQ ID NO: 37049 - DNA, 20 bp, Artificial Sequence
  chemically synthesized
ccataagcccctactttaac

SEQ ID NO: 37050 - DNA, 20 bp, Artificial Sequence
  chemically synthesized
cataagcccctactttaact

SEQ ID NO: 37051 - DNA, 20 bp, Artificial Sequence
  chemically synthesized
ataagcccctactttaactg

SEQ ID NO: 37052 - DNA, 20 bp, Artificial Sequence
  chemically synthesized
ggggaaccacaataacgttt

SEQ ID NO: 37053 - DNA, 20 bp, Artificial Sequence
  chemically synthesized
gggaaccacaataacgtttt

SEQ ID NO: 37054 - DNA, 20 bp, Artificial Sequence
  chemically synthesized
caataacgttttgggtaccc

SEQ ID NO: 37055 - DNA, 20 bp, Artificial Sequence
  chemically synthesized
gggtaccctggaatcaacgt

SEQ ID NO: 37056 - DNA, 20 bp, Artificial Sequence
  chemically synthesized
ccctggaatcaacgtcagct

SEQ ID NO: 37057 - DNA, 20 bp, Artificial Sequence
  chemically synthesized
ctggaatcaacgtcagctca

SEQ ID NO: 37058 - DNA, 20 bp, Artificial Sequence
  chemically synthesized
aatcaacgtcagctcagagc

SEQ ID NO: 37059 - DNA, 20 bp, Artificial Sequence
  chemically synthesized
gtcagctcagagccagtgtc

SEQ ID NO: 37060 - DNA, 20 bp, Artificial Sequence
  chemically synthesized
tctcattacttccctttctc

SEQ ID NO: 37061 - DNA, 20 bp, Artificial Sequence
  chemically synthesized
ttccctttctccagtacaca

SEQ ID NO: 37062 - DNA, 20 bp, Artificial Sequence
  chemically synthesized
tccagtacacacagttaccc

SEQ ID NO: 37063 - DNA, 20 bp, Artificial Sequence
  chemically synthesized
acacacagttaccctggtaa

SEQ ID NO: 37064 - DNA, 20 bp, Artificial Sequence
  chemically synthesized
cacacagttaccctggtaaa

SEQ ID NO: 37065 - DNA, 20 bp, Artificial Sequence
  chemically synthesized
cagttaccctggtaaaaggc

SEQ ID NO: 37066 - DNA, 20 bp, Artificial Sequence
  chemically synthesized
gttaccctggtaaaaggcca

SEQ ID NO: 37067 - DNA, 20 bp, Artificial Sequence
  chemically synthesized
ttaccctggtaaaaggccag

SEQ ID NO: 37068 - DNA, 20 bp, Artificial Sequence
  chemically synthesized
taaaaggccagaggtctcct

SEQ ID NO: 37069 - DNA, 20 bp, Artificial Sequence
  chemically synthesized
aaaaggccagaggtctcctt

SEQ ID NO: 37070 - DNA, 20 bp, Artificial Sequence
  chemically synthesized
aaaggccagaggtctcctta

SEQ ID NO: 37071 - DNA, 20 bp, Artificial Sequence
  chemically synthesized
ggccagaggtctccttaggg

SEQ ID NO: 37072 - DNA, 20 bp, Artificial Sequence
  chemically synthesized
gccagaggtctccttaggga

SEQ ID NO: 37073 - DNA, 20 bp, Artificial Sequence
  chemically synthesized
gaggtctccttagggaagga

SEQ ID NO: 37074 - DNA, 20 bp, Artificial Sequence
  chemically synthesized
aggtctccttagggaaggat

SEQ ID NO: 37075 - DNA, 20 bp, Artificial Sequence
  chemically synthesized
gtctccttagggaaggatgg

SEQ ID NO: 37076 - DNA, 20 bp, Artificial Sequence
  chemically synthesized
ccttagggaaggatgggaga

SEQ ID NO: 37077 - DNA, 20 bp, Artificial Sequence
  chemically synthesized
ttagggaaggatgggagaaa

SEQ ID NO: 37078 - DNA, 20 bp, Artificial Sequence
  chemically synthesized
aaggatgggagaaagagtaa

SEQ ID NO: 37079 - DNA, 20 bp, Artificial Sequence
  chemically synthesized
gggagaaagagtaacagcat

SEQ ID NO: 37080 - DNA, 20 bp, Artificial Sequence
  chemically synthesized
agagtaacagcataagttgt

SEQ ID NO: 37081 - DNA, 20 bp, Artificial Sequence
  chemically synthesized
gtaacagcataagttgtcag

SEQ ID NO: 37082 - DNA, 20 bp, Artificial Sequence
  chemically synthesized
agcataagttgtcagtagcc

SEQ ID NO: 37083 - DNA, 20 bp, Artificial Sequence
  chemically synthesized
ataagttgtcagtagcctag

SEQ ID NO: 37084 - DNA, 20 bp, Artificial Sequence
  chemically synthesized
gcctagtggtgtccttcctc

SEQ ID NO: 37085 - DNA, 20 bp, Artificial Sequence
  chemically synthesized
cctagtggtgtccttcctca

SEQ ID NO: 37086 - DNA, 20 bp, Artificial Sequence
  chemically synthesized
ctagtggtgtccttcctcaa

SEQ ID NO: 37087 - DNA, 20 bp, Artificial Sequence
  chemically synthesized
tagtggtgtccttcctcaag

SEQ ID NO: 37088 - DNA, 20 bp, Artificial Sequence
  chemically synthesized
tgtccttcctcaaggggatc

SEQ ID NO: 37089 - DNA, 20 bp, Artificial Sequence
  chemically synthesized
gatccagcctccccttcatt

SEQ ID NO: 37090 - DNA, 20 bp, Artificial Sequence
  chemically synthesized
ccagcctccccttcattcag

SEQ ID NO: 37091 - DNA, 20 bp, Artificial Sequence
  chemically synthesized
cagcctccccttcattcagt

SEQ ID NO: 37092 - DNA, 20 bp, Artificial Sequence
  chemically synthesized
ccccttcattcagtgggttc

SEQ ID NO: 37093 - DNA, 20 bp, Artificial Sequence
  chemically synthesized
agtgggttctggaactgtaa

SEQ ID NO: 37094 - DNA, 20 bp, Artificial Sequence
  chemically synthesized
gtgggttctggaactgtaac

SEQ ID NO: 37095 - DNA, 20 bp, Artificial Sequence
  chemically synthesized
tctggaactgtaacaggttc

SEQ ID NO: 37096 - DNA, 20 bp, Artificial Sequence
  chemically synthesized
aactgtaacaggttcgagtc

SEQ ID NO: 37097 - DNA, 20 bp, Artificial Sequence
  chemically synthesized
ttcgagtctggaaattgatt

SEQ ID NO: 37098 - DNA, 20 bp, Artificial Sequence
  chemically synthesized
tcgagtctggaaattgattg

SEQ ID NO: 37099 - DNA, 20 bp, Artificial Sequence
  chemically synthesized
cgagtctggaaattgattga

SEQ ID NO: 37100 - DNA, 20 bp, Artificial Sequence
  chemically synthesized
gattctctgtttttataatt

SEQ ID NO: 37101 - DNA, 20 bp, Artificial Sequence
  chemically synthesized
tctgtttttataattcagat

SEQ ID NO: 37102 - DNA, 20 bp, Artificial Sequence
  chemically synthesized
ttataattcagattagtctt

SEQ ID NO: 37103 - DNA, 20 bp, Artificial Sequence
  chemically synthesized
agtctttagtccattctacc

SEQ ID NO: 37104 - DNA, 20 bp, Artificial Sequence
  chemically synthesized
ctttagtccattctacctgg

SEQ ID NO: 37105 - DNA, 20 bp, Artificial Sequence
  chemically synthesized
gttttttgtttatataaatc

SEQ ID NO: 37106 - DNA, 20 bp, Artificial Sequence
  chemically synthesized
ttttgtttatataaatcaag

SEQ ID NO: 37107 - DNA, 20 bp, Artificial Sequence
  chemically synthesized
tttgtttatataaatcaagt

SEQ ID NO: 37108 - DNA, 20 bp, Artificial Sequence
  chemically synthesized
atataaatcaagtaggaata

SEQ ID NO: 37109 - DNA, 20 bp, Artificial Sequence
  chemically synthesized
taaatcaagtaggaatacag

SEQ ID NO: 37110 - DNA, 20 bp, Artificial Sequence
  chemically synthesized
aaatcaagtaggaatacagt

SEQ ID NO: 37111 - DNA, 20 bp, Artificial Sequence
  chemically synthesized
tttcccatcaatttcacttc

SEQ ID NO: 37112 - DNA, 20 bp, Artificial Sequence
  chemically synthesized
ttcccatcaatttcacttct

SEQ ID NO: 37113 - DNA, 20 bp, Artificial Sequence
  chemically synthesized
ctaggaacaccatgattaat

SEQ ID NO: 37114 - DNA, 20 bp, Artificial Sequence
  chemically synthesized
catgattaattagccaatgc

SEQ ID NO: 37115 - DNA, 20 bp, Artificial Sequence
  chemically synthesized
tgattaattagccaatgcca

SEQ ID NO: 37116 - DNA, 20 bp, Artificial Sequence
  chemically synthesized
ccaatgccagagctctacat

SEQ ID NO: 37117 - DNA, 20 bp, Artificial Sequence
  chemically synthesized
tgccagagctctacatgagt

SEQ ID NO: 37118 - DNA, 20 bp, Artificial Sequence
  chemically synthesized
catgagtcagactattctga

SEQ ID NO: 37119 - DNA, 20 bp, Artificial Sequence
  chemically synthesized
tttgcctctgctgtctatta

SEQ ID NO: 37120 - DNA, 20 bp, Artificial Sequence
  chemically synthesized
gcctctgctgtctattatgg

SEQ ID NO: 37121 - DNA, 20 bp, Artificial Sequence
  chemically synthesized
tatgcccaccttgcctttga

SEQ ID NO: 37122 - DNA, 20 bp, Artificial Sequence
  chemically synthesized
ccaccttgcctttgatggtt

SEQ ID NO: 37123 - DNA, 20 bp, Artificial Sequence
  chemically synthesized
gatggttcagtgccaacact

SEQ ID NO: 37124 - DNA, 20 bp, Artificial Sequence
  chemically synthesized
acacttggcccctgccacct

SEQ ID NO: 37125 - DNA, 20 bp, Artificial Sequence
  chemically synthesized
cacttggcccctgccacctc

SEQ ID NO: 37126 - DNA, 20 bp, Artificial Sequence
  chemically synthesized
cccattgtatttaaattttg

SEQ ID NO: 37127 - DNA, 20 bp, Artificial Sequence
  chemically synthesized
tgtatttaaattttgtagtt

SEQ ID NO: 37128 - DNA, 20 bp, Artificial Sequence
  chemically synthesized
attttgtagttgagtgactg

SEQ ID NO: 37129 - DNA, 20 bp, Artificial Sequence
  chemically synthesized
gtgactgtggttcctactgt

SEQ ID NO: 37130 - DNA, 20 bp, Artificial Sequence
  chemically synthesized
ctactgttagatctgacata

SEQ ID NO: 37131 - DNA, 20 bp, Artificial Sequence
  chemically synthesized
actgttagatctgacataca

SEQ ID NO: 37132 - DNA, 20 bp, Artificial Sequence
  chemically synthesized
gttagatctgacatacagag

SEQ ID NO: 37133 - DNA, 20 bp, Artificial Sequence
  chemically synthesized
tagatctgacatacagagaa

SEQ ID NO: 37134 - DNA, 20 bp, Artificial Sequence
  chemically synthesized
catacagagaagagcaatta

SEQ ID NO: 37135 - DNA, 20 bp, Artificial Sequence
  chemically synthesized
atacagagaagagcaattac

SEQ ID NO: 37136 - DNA, 20 bp, Artificial Sequence
  chemically synthesized
ttacgggctcttcaaaaata

SEQ ID NO: 37137 - DNA, 20 bp, Artificial Sequence
  chemically synthesized
tacgggctcttcaaaaatac

SEQ ID NO: 37138 - DNA, 20 bp, Artificial Sequence
  chemically synthesized
tctcacaaatctatttcaca

SEQ ID NO: 37139 - DNA, 20 bp, Artificial Sequence
  chemically synthesized
aaatctatttcacaaagctt

SEQ ID NO: 37140 - DNA, 20 bp, Artificial Sequence
  chemically synthesized
tatttcacaaagcttcggcc

SEQ ID NO: 37141 - DNA, 20 bp, Artificial Sequence
  chemically synthesized
atttcacaaagcttcggcca

SEQ ID NO: 37142 - DNA, 20 bp, Artificial Sequence
  chemically synthesized
tttcacaaagcttcggccaa

SEQ ID NO: 37143 - DNA, 20 bp, Artificial Sequence
  chemically synthesized
tcggccaagggtgtatcttc

SEQ ID NO: 37144 - DNA, 20 bp, Artificial Sequence
  chemically synthesized
gtgtatcttctggaccctcc

SEQ ID NO: 37145 - DNA, 20 bp, Artificial Sequence
  chemically synthesized
atcttctggaccctcccagc

SEQ ID NO: 37146 - DNA, 20 bp, Artificial Sequence
  chemically synthesized
tcttctggaccctcccagct

SEQ ID NO: 37147 - DNA, 20 bp, Artificial Sequence
  chemically synthesized
tggaccctcccagctgggat

SEQ ID NO: 37148 - DNA, 20 bp, Artificial Sequence
  chemically synthesized
accctcccagctgggatgag

SEQ ID NO: 37149 - DNA, 20 bp, Artificial Sequence
  chemically synthesized
ccctcccagctgggatgagt

SEQ ID NO: 37150 - DNA, 20 bp, Artificial Sequence
  chemically synthesized
agctgggatgagtaggtcta

SEQ ID NO: 37151 - DNA, 20 bp, Artificial Sequence
  chemically synthesized
tccaccatcctaatctccct

SEQ ID NO: 37152 - DNA, 20 bp, Artificial Sequence
  chemically synthesized
tcctaatctccctaagcctt

SEQ ID NO: 37153 - DNA, 20 bp, Artificial Sequence
  chemically synthesized
cacttcctctacattaaacc

SEQ ID NO: 37154 - DNA, 20 bp, Artificial Sequence
  chemically synthesized
acttcctctacattaaacca

SEQ ID NO: 37155 - DNA, 20 bp, Artificial Sequence
  chemically synthesized
acattaaaccaaggcatttc

SEQ ID NO: 37156 - DNA, 20 bp, Artificial Sequence
  chemically synthesized
catttccagctcactaacat

SEQ ID NO: 37157 - DNA, 20 bp, Artificial Sequence
  chemically synthesized
ccatcttttaatccatattt

SEQ ID NO: 37158 - DNA, 20 bp, Artificial Sequence
  chemically synthesized
aatccatatttcagctaacc

SEQ ID NO: 37159 - DNA, 20 bp, Artificial Sequence
  chemically synthesized
aacttttttttttttttttt

SEQ ID NO: 37160 - DNA, 20 bp, Artificial Sequence
  chemically synthesized
tttttttttttttttggaaa

SEQ ID NO: 37161 - DNA, 20 bp, Artificial Sequence
  chemically synthesized
tttttttttttttggaaatg

SEQ ID NO: 37162 - DNA, 20 bp, Artificial Sequence
  chemically synthesized
atggagtcttgctctgttac

SEQ ID NO: 37163 - DNA, 20 bp, Artificial Sequence
  chemically synthesized
tggagtcttgctctgttacc

SEQ ID NO: 37164 - DNA, 20 bp, Artificial Sequence
  chemically synthesized
gtcttgctctgttaccaggc

SEQ ID NO: 37165 - DNA, 20 bp, Artificial Sequence
  chemically synthesized
tctgttaccaggctggaatg

SEQ ID NO: 37166 - DNA, 20 bp, Artificial Sequence
  chemically synthesized
gttaccaggctggaatgcag

SEQ ID NO: 37167 - DNA, 20 bp, Artificial Sequence
  chemically synthesized
ttaccaggctggaatgcagt

SEQ ID NO: 37168 - DNA, 20 bp, Artificial Sequence
  chemically synthesized
taccaggctggaatgcagtg

SEQ ID NO: 37169 - DNA, 20 bp, Artificial Sequence
  chemically synthesized
ggaatgcagtggggcgatct

SEQ ID NO: 37170 - DNA, 20 bp, Artificial Sequence
  chemically synthesized
tcactgcaatctctgcctca

SEQ ID NO: 37171 - DNA, 20 bp, Artificial Sequence
  chemically synthesized
cactgcaatctctgcctcac

SEQ ID NO: 37172 - DNA, 20 bp, Artificial Sequence
  chemically synthesized
aatctctgcctcacaggttc

SEQ ID NO: 37173 - DNA, 20 bp, Artificial Sequence
  chemically synthesized
ctctgcctcacaggttcaag

SEQ ID NO: 37174 - DNA, 20 bp, Artificial Sequence
  chemically synthesized
ttcaagcagttctcttgcct

SEQ ID NO: 37175 - DNA, 20 bp, Artificial Sequence
  chemically synthesized
ttctcttgcctcagcctccc

SEQ ID NO: 37176 - DNA, 20 bp, Artificial Sequence
  chemically synthesized
tcttgcctcagcctcccaag

SEQ ID NO: 37177 - DNA, 20 bp, Artificial Sequence
  chemically synthesized
cctcagcctcccaagtagat

SEQ ID NO: 37178 - DNA, 20 bp, Artificial Sequence
  chemically synthesized
ctcccaagtagatgagatta

SEQ ID NO: 37179 - DNA, 20 bp, Artificial Sequence
  chemically synthesized
cagttacgcatcaccatgcc

SEQ ID NO: 37180 - DNA, 20 bp, Artificial Sequence
  chemically synthesized
ccagctaatttttgtatttt

SEQ ID NO: 37181 - DNA, 20 bp, Artificial Sequence
  chemically synthesized
gctaatttttgtatttttag

SEQ ID NO: 37182 - DNA, 20 bp, Artificial Sequence
  chemically synthesized
taatttttgtatttttagca

SEQ ID NO: 37183 - DNA, 20 bp, Artificial Sequence
  chemically synthesized
ttttgtatttttagcagaga

SEQ ID NO: 37184 - DNA, 20 bp, Artificial Sequence
  chemically synthesized
tttgtatttttagcagagat

SEQ ID NO: 37185 - DNA, 20 bp, Artificial Sequence
  chemically synthesized
ttgtatttttagcagagatg

SEQ ID NO: 37186 - DNA, 20 bp, Artificial Sequence
  chemically synthesized
gagatggggtttcaccattt

SEQ ID NO: 37187 - DNA, 20 bp, Artificial Sequence
  chemically synthesized
tggggtttcaccattttagc

SEQ ID NO: 37188 - DNA, 20 bp, Artificial Sequence
  chemically synthesized
tctgcccgcccccgcctccc

SEQ ID NO: 37189 - DNA, 20 bp, Artificial Sequence
  chemically synthesized
ctgcccgcccccgcctccca

SEQ ID NO: 37190 - DNA, 20 bp, Artificial Sequence
  chemically synthesized
gcccccgcctcccaaggtgc

SEQ ID NO: 37191 - DNA, 20 bp, Artificial Sequence
  chemically synthesized
cccccgcctcccaaggtgct

SEQ ID NO: 37192 - DNA, 20 bp, Artificial Sequence
  chemically synthesized
ctcccaaggtgctgggatta

SEQ ID NO: 37193 - DNA, 20 bp, Artificial Sequence
  chemically synthesized
tcccaaggtgctgggattac

SEQ ID NO: 37194 - DNA, 20 bp, Artificial Sequence
  chemically synthesized
ggtgctgggattacaggcgt

SEQ ID NO: 37195 - DNA, 20 bp, Artificial Sequence
  chemically synthesized
caggcgtgagccactgctcc

SEQ ID NO: 37196 - DNA, 20 bp, Artificial Sequence
  chemically synthesized
gccactgctcccggccctat

SEQ ID NO: 37197 - DNA, 20 bp, Artificial Sequence
  chemically synthesized
gccctatcagaaccttttct

SEQ ID NO: 37198 - DNA, 20 bp, Artificial Sequence
  chemically synthesized
agaaccttttctaagtcccc

SEQ ID NO: 37199 - DNA, 20 bp, Artificial Sequence
  chemically synthesized
ccgagctgcaacattaaatg

SEQ ID NO: 37200 - DNA, 20 bp, Artificial Sequence
  chemically synthesized
ttaaatgcagaatccctact

SEQ ID NO: 37201 - DNA, 20 bp, Artificial Sequence
  chemically synthesized
aatgcagaatccctacttag

SEQ ID NO: 37202 - DNA, 20 bp, Artificial Sequence
  chemically synthesized
atgcagaatccctacttagt

SEQ ID NO: 37203 - DNA, 20 bp, Artificial Sequence
  chemically synthesized
tgcagaatccctacttagta

SEQ ID NO: 37204 - DNA, 20 bp, Artificial Sequence
  chemically synthesized
tagggccaaaccaataaatt

SEQ ID NO: 37205 - DNA, 20 bp, Artificial Sequence
  chemically synthesized
ccattcccatgcctgttctc

SEQ ID NO: 37206 - DNA, 20 bp, Artificial Sequence
  chemically synthesized
agatttctgccaatataaat

SEQ ID NO: 37207 - DNA, 20 bp, Artificial Sequence
  chemically synthesized
ttctgccaatataaattaga

SEQ ID NO: 37208 - DNA, 20 bp, Artificial Sequence
  chemically synthesized
caatataaattagaaagctt

SEQ ID NO: 37209 - DNA, 20 bp, Artificial Sequence
  chemically synthesized
tataaattagaaagcttaag

SEQ ID NO: 37210 - DNA, 20 bp, Artificial Sequence
  chemically synthesized
gaaagcttaagcagttcttt

SEQ ID NO: 37211 - DNA, 20 bp, Artificial Sequence
  chemically synthesized
aagcttaagcagttctttta

SEQ ID NO: 37212 - DNA, 20 bp, Artificial Sequence
  chemically synthesized
gagtataatgcacctcctca

SEQ ID NO: 37213 - DNA, 20 bp, Artificial Sequence
  chemically synthesized
agtataatgcacctcctcat

SEQ ID NO: 37214 - DNA, 20 bp, Artificial Sequence
  chemically synthesized
cacactctgaacctcacctc

SEQ ID NO: 37215 - DNA, 20 bp, Artificial Sequence
  chemically synthesized
acactctgaacctcacctct

SEQ ID NO: 37216 - DNA, 20 bp, Artificial Sequence
  chemically synthesized
cactctgaacctcacctctg

SEQ ID NO: 37217 - DNA, 20 bp, Artificial Sequence
  chemically synthesized
acctcacctctggggcccgc

SEQ ID NO: 37218 - DNA, 20 bp, Artificial Sequence
  chemically synthesized
cctcacctctggggcccgca

SEQ ID NO: 37219 - DNA, 20 bp, Artificial Sequence
  chemically synthesized
tctggggcccgcaaggaatt

SEQ ID NO: 37220 - DNA, 20 bp, Artificial Sequence
  chemically synthesized
ggcccgcaaggaatttagcc

SEQ ID NO: 37221 - DNA, 20 bp, Artificial Sequence
  chemically synthesized
caaggaatttagcctagtta

SEQ ID NO: 37222 - DNA, 20 bp, Artificial Sequence
  chemically synthesized
aaggaatttagcctagttat

SEQ ID NO: 37223 - DNA, 20 bp, Artificial Sequence
  chemically synthesized
atttagcctagttataggtc

SEQ ID NO: 37224 - DNA, 20 bp, Artificial Sequence
  chemically synthesized
tagcctagttataggtctag

SEQ ID NO: 37225 - DNA, 20 bp, Artificial Sequence
  chemically synthesized
gttataggtctagaagcatt

SEQ ID NO: 37226 - DNA, 20 bp, Artificial Sequence
  chemically synthesized
ttataggtctagaagcattc

SEQ ID NO: 37227 - DNA, 20 bp, Artificial Sequence
  chemically synthesized
tataggtctagaagcattca

SEQ ID NO: 37228 - DNA, 20 bp, Artificial Sequence
  chemically synthesized
ataggtctagaagcattcag

SEQ ID NO: 37229 - DNA, 20 bp, Artificial Sequence
  chemically synthesized
ctagaagcattcaggggcat

SEQ ID NO: 37230 - DNA, 20 bp, Artificial Sequence
  chemically synthesized
tagaagcattcaggggcatt

SEQ ID NO: 37231 - DNA, 20 bp, Artificial Sequence
  chemically synthesized
agaagcattcaggggcatta

SEQ ID NO: 37232 - DNA, 20 bp, Artificial Sequence
  chemically synthesized
gaagcattcaggggcattag

SEQ ID NO: 37233 - DNA, 20 bp, Artificial Sequence
  chemically synthesized
gggcattaggggtgcctctt

SEQ ID NO: 37234 - DNA, 20 bp, Artificial Sequence
  chemically synthesized
ggcattaggggtgcctcttg

SEQ ID NO: 37235 - DNA, 20 bp, Artificial Sequence
  chemically synthesized
cattaggggtgcctcttgag

SEQ ID NO: 37236 - DNA, 20 bp, Artificial Sequence
  chemically synthesized
agaatcaacattatcttgcc

SEQ ID NO: 37237 - DNA, 20 bp, Artificial Sequence
  chemically synthesized
atcaacattatcttgcctgg

SEQ ID NO: 37238 - DNA, 20 bp, Artificial Sequence
  chemically synthesized
atcttgcctggcagctgcct

SEQ ID NO: 37239 - DNA, 20 bp, Artificial Sequence
  chemically synthesized
tcttgcctggcagctgcctc

SEQ ID NO: 37240 - DNA, 20 bp, Artificial Sequence
  chemically synthesized
cttgcctggcagctgcctca

SEQ ID NO: 37241 - DNA, 20 bp, Artificial Sequence
  chemically synthesized
gcctggcagctgcctcaggg

SEQ ID NO: 37242 - DNA, 20 bp, Artificial Sequence
  chemically synthesized
cctggcagctgcctcaggga

SEQ ID NO: 37243 - DNA, 20 bp, Artificial Sequence
  chemically synthesized
aaggccatcactgttgcctc

SEQ ID NO: 37244 - DNA, 20 bp, Artificial Sequence
  chemically synthesized
gccatcactgttgcctcaag

SEQ ID NO: 37245 - DNA, 20 bp, Artificial Sequence
  chemically synthesized
cactgttgcctcaagcagtg

SEQ ID NO: 37246 - DNA, 20 bp, Artificial Sequence
  chemically synthesized
actgttgcctcaagcagtgc

SEQ ID NO: 37247 - DNA, 20 bp, Artificial Sequence
  chemically synthesized
ctgttgcctcaagcagtgca

SEQ ID NO: 37248 - DNA, 20 bp, Artificial Sequence
  chemically synthesized
cagtgcagggtttacatcct

SEQ ID NO: 37249 - DNA, 20 bp, Artificial Sequence
  chemically synthesized
agggtttacatcctcagaca

SEQ ID NO: 37250 - DNA, 20 bp, Artificial Sequence
  chemically synthesized
gggtttacatcctcagacaa

SEQ ID NO: 37251 - DNA, 20 bp, Artificial Sequence
  chemically synthesized
tttacatcctcagacaaagg

SEQ ID NO: 37252 - DNA, 20 bp, Artificial Sequence
  chemically synthesized
catcctcagacaaaggtgga

SEQ ID NO: 37253 - DNA, 20 bp, Artificial Sequence
  chemically synthesized
atcctcagacaaaggtggaa

SEQ ID NO: 37254 - DNA, 20 bp, Artificial Sequence
  chemically synthesized
gacaaaggtggaaaggctaa

SEQ ID NO: 37255 - DNA, 20 bp, Artificial Sequence
  chemically synthesized
aaaggtggaaaggctaatgg

SEQ ID NO: 37256 - DNA, 20 bp, Artificial Sequence
  chemically synthesized
tggaaaggctaatggcagca

SEQ ID NO: 37257 - DNA, 20 bp, Artificial Sequence
  chemically synthesized
ggaaaggctaatggcagcac

SEQ ID NO: 37258 - DNA, 20 bp, Artificial Sequence
  chemically synthesized
aggctaatggcagcacgggt

SEQ ID NO: 37259 - DNA, 20 bp, Artificial Sequence
  chemically synthesized
ggctaatggcagcacgggtc

SEQ ID NO: 37260 - DNA, 20 bp, Artificial Sequence
  chemically synthesized
gctaatggcagcacgggtca

SEQ ID NO: 37261 - DNA, 20 bp, Artificial Sequence
  chemically synthesized
taatggcagcacgggtcagg

SEQ ID NO: 37262 - DNA, 20 bp, Artificial Sequence
  chemically synthesized
aatggcagcacgggtcaggg

SEQ ID NO: 37263 - DNA, 20 bp, Artificial Sequence
  chemically synthesized
atggcagcacgggtcaggga

SEQ ID NO: 37264 - DNA, 20 bp, Artificial Sequence
  chemically synthesized
tggcagcacgggtcagggag

SEQ ID NO: 37265 - DNA, 20 bp, Artificial Sequence
  chemically synthesized
ggaggggatgttaccactac

SEQ ID NO: 37266 - DNA, 20 bp, Artificial Sequence
  chemically synthesized
gaggggatgttaccactact

SEQ ID NO: 37267 - DNA, 20 bp, Artificial Sequence
  chemically synthesized
aggggatgttaccactactg

SEQ ID NO: 37268 - DNA, 20 bp, Artificial Sequence
  chemically synthesized
gatgttaccactactgggga

SEQ ID NO: 37269 - DNA, 20 bp, Artificial Sequence
  chemically synthesized
atgttaccactactggggat

SEQ ID NO: 37270 - DNA, 20 bp, Artificial Sequence
  chemically synthesized
tgttaccactactggggatg

SEQ ID NO: 37271 - DNA, 20 bp, Artificial Sequence
  chemically synthesized
gatggggaaactgtttcttc

SEQ ID NO: 37272 - DNA, 20 bp, Artificial Sequence
  chemically synthesized
aactgtttcttctggcaaaa

SEQ ID NO: 37273 - DNA, 20 bp, Artificial Sequence
  chemically synthesized
ttctggcaaaaaagtttcat

SEQ ID NO: 37274 - DNA, 20 bp, Artificial Sequence
  chemically synthesized
ctggcaaaaaagtttcatca

SEQ ID NO: 37275 - DNA, 20 bp, Artificial Sequence
  chemically synthesized
ttcatcagagttcacaaact

SEQ ID NO: 37276 - DNA, 20 bp, Artificial Sequence
  chemically synthesized
gttcacaaactcagtgtcct

SEQ ID NO: 37277 - DNA, 20 bp, Artificial Sequence
  chemically synthesized
ctcagtgtcctcagcttcat

SEQ ID NO: 37278 - DNA, 20 bp, Artificial Sequence
  chemically synthesized
tcagtgtcctcagcttcatc

SEQ ID NO: 37279 - DNA, 20 bp, Artificial Sequence
  chemically synthesized
cagtgtcctcagcttcatca

SEQ ID NO: 37280 - DNA, 20 bp, Artificial Sequence
  chemically synthesized
ctcccacacatccccactcc

SEQ ID NO: 37281 - DNA, 20 bp, Artificial Sequence
  chemically synthesized
cacatccccactccaagttc

SEQ ID NO: 37282 - DNA, 20 bp, Artificial Sequence
  chemically synthesized
acatccccactccaagttcc

SEQ ID NO: 37283 - DNA, 20 bp, Artificial Sequence
  chemically synthesized
catccccactccaagttcca

SEQ ID NO: 37284 - DNA, 20 bp, Artificial Sequence
  chemically synthesized
tccagggtcccatttttttc

SEQ ID NO: 37285 - DNA, 20 bp, Artificial Sequence
  chemically synthesized
agtcaatgccctcactttaa

SEQ ID NO: 37286 - DNA, 20 bp, Artificial Sequence
  chemically synthesized
tcactttaacagtaaacacc

SEQ ID NO: 37287 - DNA, 20 bp, Artificial Sequence
  chemically synthesized
tttaacagtaaacacctggc

SEQ ID NO: 37288 - DNA, 20 bp, Artificial Sequence
  chemically synthesized
ttaacagtaaacacctggca

SEQ ID NO: 37289 - DNA, 20 bp, Artificial Sequence
  chemically synthesized
tgtgcatgcacctcttgttg

SEQ ID NO: 37290 - DNA, 20 bp, Artificial Sequence
  chemically synthesized
atgcacctcttgttgcagat

SEQ ID NO: 37291 - DNA, 20 bp, Artificial Sequence
  chemically synthesized
atcagctactcgcatgataa

SEQ ID NO: 37292 - DNA, 20 bp, Artificial Sequence
  chemically synthesized
caatttcaactctttctcta

SEQ ID NO: 37293 - DNA, 20 bp, Artificial Sequence
  chemically synthesized
aatttcaactctttctctac

SEQ ID NO: 37294 - DNA, 20 bp, Artificial Sequence
  chemically synthesized
tttcaactctttctctacag

SEQ ID NO: 37295 - DNA, 20 bp, Artificial Sequence
  chemically synthesized
caggagttaaaactctcatt

SEQ ID NO: 37296 - DNA, 20 bp, Artificial Sequence
  chemically synthesized
aggagttaaaactctcattc

SEQ ID NO: 37297 - DNA, 20 bp, Artificial Sequence
  chemically synthesized
ggagttaaaactctcattca

SEQ ID NO: 37298 - DNA, 20 bp, Artificial Sequence
  chemically synthesized
actctcattcagggcaatct

SEQ ID NO: 37299 - DNA, 20 bp, Artificial Sequence
  chemically synthesized
ctcattcagggcaatcttag

SEQ ID NO: 37300 - DNA, 20 bp, Artificial Sequence
  chemically synthesized
gggcaatcttagcagatttg

SEQ ID NO: 37301 - DNA, 20 bp, Artificial Sequence
  chemically synthesized
atcttagcagatttgtggct

SEQ ID NO: 37302 - DNA, 20 bp, Artificial Sequence
  chemically synthesized
tggctcagtatctgcttctg

SEQ ID NO: 37303 - DNA, 20 bp, Artificial Sequence
  chemically synthesized
ggctcagtatctgcttctga

SEQ ID NO: 37304 - DNA, 20 bp, Artificial Sequence
  chemically synthesized
tcagtatctgcttctgaagg

SEQ ID NO: 37305 - DNA, 20 bp, Artificial Sequence
  chemically synthesized
cagtatctgcttctgaaggt

SEQ ID NO: 37306 - DNA, 20 bp, Artificial Sequence
  chemically synthesized
gtatctgcttctgaaggtgg

SEQ ID NO: 37307 - DNA, 20 bp, Artificial Sequence
  chemically synthesized
ctgcttctgaaggtgggaga

SEQ ID NO: 37308 - DNA, 20 bp, Artificial Sequence
  chemically synthesized
aggtgggagacagatcccct

SEQ ID NO: 37309 - DNA, 20 bp, Artificial Sequence
  chemically synthesized
ttttctttcatctctttctc

SEQ ID NO: 37310 - DNA, 20 bp, Artificial Sequence
  chemically synthesized
ttctttcatctctttctcca

SEQ ID NO: 37311 - DNA, 20 bp, Artificial Sequence
  chemically synthesized
atctctttctccagagaact

SEQ ID NO: 37312 - DNA, 20 bp, Artificial Sequence
  chemically synthesized
tctctttctccagagaactt

SEQ ID NO: 37313 - DNA, 20 bp, Artificial Sequence
  chemically synthesized
tctttctccagagaacttag

SEQ ID NO: 37314 - DNA, 20 bp, Artificial Sequence
  chemically synthesized
accaacttcattatgttcct

SEQ ID NO: 37315 - DNA, 20 bp, Artificial Sequence
  chemically synthesized
gttccttggttctccacata

SEQ ID NO: 37316 - DNA, 20 bp, Artificial Sequence
  chemically synthesized
tggttctccacatatagtca

SEQ ID NO: 37317 - DNA, 20 bp, Artificial Sequence
  chemically synthesized
ggttctccacatatagtcaa

SEQ ID NO: 37318 - DNA, 20 bp, Artificial Sequence
  chemically synthesized
atagtcaaaggtattatgta

SEQ ID NO: 37319 - DNA, 20 bp, Artificial Sequence
  chemically synthesized
agtcaaaggtattatgtata

SEQ ID NO: 37320 - DNA, 20 bp, Artificial Sequence
  chemically synthesized
ctaaactccttgcctctcat

SEQ ID NO: 37321 - DNA, 20 bp, Artificial Sequence
  chemically synthesized
gcctctcataagtgatgaat

SEQ ID NO: 37322 - DNA, 20 bp, Artificial Sequence
  chemically synthesized
tctcataagtgatgaatcag

SEQ ID NO: 37323 - DNA, 20 bp, Artificial Sequence
  chemically synthesized
gcataactctctaaacaatt

SEQ ID NO: 37324 - DNA, 20 bp, Artificial Sequence
  chemically synthesized
cataactctctaaacaattc

SEQ ID NO: 37325 - DNA, 20 bp, Artificial Sequence
  chemically synthesized
ctctctaaacaattcaggcc

SEQ ID NO: 37326 - DNA, 20 bp, Artificial Sequence
  chemically synthesized
caattcaggccaagtactat

SEQ ID NO: 37327 - DNA, 20 bp, Artificial Sequence
  chemically synthesized
atcagtgttctccatactat

SEQ ID NO: 37328 - DNA, 20 bp, Artificial Sequence
  chemically synthesized
agtgttctccatactattag

SEQ ID NO: 37329 - DNA, 20 bp, Artificial Sequence
  chemically synthesized
gttctccatactattagaag

SEQ ID NO: 37330 - DNA, 20 bp, Artificial Sequence
  chemically synthesized
tctccatactattagaagta

SEQ ID NO: 37331 - DNA, 20 bp, Artificial Sequence
  chemically synthesized
actattagaagtagagtcct

SEQ ID NO: 37332 - DNA, 20 bp, Artificial Sequence
  chemically synthesized
gtagagtccttagcattttt

SEQ ID NO: 37333 - DNA, 20 bp, Artificial Sequence
  chemically synthesized
tttggtctaatcatattaat

SEQ ID NO: 37334 - DNA, 20 bp, Artificial Sequence
  chemically synthesized
tcatattaatcagccaacac

SEQ ID NO: 37335 - DNA, 20 bp, Artificial Sequence
  chemically synthesized
tattaatcagccaacaccag

SEQ ID NO: 37336 - DNA, 20 bp, Artificial Sequence
  chemically synthesized
agaagtcccaaaaccaatga

SEQ ID NO: 37337 - DNA, 20 bp, Artificial Sequence
  chemically synthesized
tccttaatattctgttcctc

SEQ ID NO: 37338 - DNA, 20 bp, Artificial Sequence
  chemically synthesized
tgttcctcaagaaccacttc

SEQ ID NO: 37339 - DNA, 20 bp, Artificial Sequence
  chemically synthesized
tctggtatgaaaatctgtat

SEQ ID NO: 37340 - DNA, 20 bp, Artificial Sequence
  chemically synthesized
gtatgaaaatctgtattagt

SEQ ID NO: 37341 - DNA, 20 bp, Artificial Sequence
  chemically synthesized
tatgaaaatctgtattagtc

SEQ ID NO: 37342 - DNA, 20 bp, Artificial Sequence
  chemically synthesized
atgaaaatctgtattagtcg

SEQ ID NO: 37343 - DNA, 20 bp, Artificial Sequence
  chemically synthesized
ctgtattagtcggggttctc

SEQ ID NO: 37344 - DNA, 20 bp, Artificial Sequence
  chemically synthesized
gtattagtcggggttctcta

SEQ ID NO: 37345 - DNA, 20 bp, Artificial Sequence
  chemically synthesized
tattagtcggggttctctag

SEQ ID NO: 37346 - DNA, 20 bp, Artificial Sequence
  chemically synthesized
attagtcggggttctctaga

SEQ ID NO: 37347 - DNA, 20 bp, Artificial Sequence
  chemically synthesized
gtcggggttctctagaggga

SEQ ID NO: 37348 - DNA, 20 bp, Artificial Sequence
  chemically synthesized
ctctagagggacagaactaa

SEQ ID NO: 37349 - DNA, 20 bp, Artificial Sequence
  chemically synthesized
tctagagggacagaactaat

SEQ ID NO: 37350 - DNA, 20 bp, Artificial Sequence
  chemically synthesized
tagagggacagaactaatag

SEQ ID NO: 37351 - DNA, 20 bp, Artificial Sequence
  chemically synthesized
gattatatatatatatatat

SEQ ID NO: 37352 - DNA, 20 bp, Artificial Sequence
  chemically synthesized
ttatatatatatatatatga

SEQ ID NO: 37353 - DNA, 20 bp, Artificial Sequence
  chemically synthesized
atatatatatatatatgaga

SEQ ID NO: 37354 - DNA, 20 bp, Artificial Sequence
  chemically synthesized
atatatatatatatgagaga

SEQ ID NO: 37355 - DNA, 20 bp, Artificial Sequence
  chemically synthesized
atatatatatatgagagaga

SEQ ID NO: 37356 - DNA, 20 bp, Artificial Sequence
  chemically synthesized
atatatatatgagagagaga

SEQ ID NO: 37357 - DNA, 20 bp, Artificial Sequence
  chemically synthesized
atatatatgagagagagaga

SEQ ID NO: 37358 - DNA, 20 bp, Artificial Sequence
  chemically synthesized
atatatgagagagagagaga

SEQ ID NO: 37359 - DNA, 20 bp, Artificial Sequence
  chemically synthesized
atatgagagagagagagaga

SEQ ID NO: 37360 - DNA, 20 bp, Artificial Sequence
  chemically synthesized
tatgtatatatgtgtatata

SEQ ID NO: 37361 - DNA, 20 bp, Artificial Sequence
  chemically synthesized
tatatatgtgtatatatagt

SEQ ID NO: 37362 - DNA, 20 bp, Artificial Sequence
  chemically synthesized
agtatacctatatctatcta

SEQ ID NO: 37363 - DNA, 20 bp, Artificial Sequence
  chemically synthesized
cctatatctatctatagata

SEQ ID NO: 37364 - DNA, 20 bp, Artificial Sequence
  chemically synthesized
gatatagatatactcacaca

SEQ ID NO: 37365 - DNA, 20 bp, Artificial Sequence
  chemically synthesized
atatagatatactcacacaa

SEQ ID NO: 37366 - DNA, 20 bp, Artificial Sequence
  chemically synthesized
tatagatatactcacacaaa

SEQ ID NO: 37367 - DNA, 20 bp, Artificial Sequence
  chemically synthesized
atagatatactcacacaaag

SEQ ID NO: 37368 - DNA, 20 bp, Artificial Sequence
  chemically synthesized
agatatactcacacaaaggg

SEQ ID NO: 37369 - DNA, 20 bp, Artificial Sequence
  chemically synthesized
cacacaaaggggagcttatt

SEQ ID NO: 37370 - DNA, 20 bp, Artificial Sequence
  chemically synthesized
acaaaggggagcttattaag

SEQ ID NO: 37371 - DNA, 20 bp, Artificial Sequence
  chemically synthesized
attaagtggtattaactcac

SEQ ID NO: 37372 - DNA, 20 bp, Artificial Sequence
  chemically synthesized
gtattaactcacaagattac

SEQ ID NO: 37373 - DNA, 20 bp, Artificial Sequence
  chemically synthesized
tattaactcacaagattaca

SEQ ID NO: 37374 - DNA, 20 bp, Artificial Sequence
  chemically synthesized
aagattacaaggtcccataa

SEQ ID NO: 37375 - DNA, 20 bp, Artificial Sequence
  chemically synthesized
agattacaaggtcccataat

SEQ ID NO: 37376 - DNA, 20 bp, Artificial Sequence
  chemically synthesized
taataggccacctgcaatct

SEQ ID NO: 37377 - DNA, 20 bp, Artificial Sequence
  chemically synthesized
aataggccacctgcaatctg

SEQ ID NO: 37378 - DNA, 20 bp, Artificial Sequence
  chemically synthesized
taggccacctgcaatctgag

SEQ ID NO: 37379 - DNA, 20 bp, Artificial Sequence
  chemically synthesized
ccacctgcaatctgaggagc

SEQ ID NO: 37380 - DNA, 20 bp, Artificial Sequence
  chemically synthesized
cacctgcaatctgaggagca

SEQ ID NO: 37381 - DNA, 20 bp, Artificial Sequence
  chemically synthesized
ctgcaatctgaggagcaagg

SEQ ID NO: 37382 - DNA, 20 bp, Artificial Sequence
  chemically synthesized
aatctgaggagcaaggaaga

SEQ ID NO: 37383 - DNA, 20 bp, Artificial Sequence
  chemically synthesized
aggagcaaggaagacagtcc

SEQ ID NO: 37384 - DNA, 20 bp, Artificial Sequence
  chemically synthesized
ggaagacagtccaagtccca

SEQ ID NO: 37385 - DNA, 20 bp, Artificial Sequence
  chemically synthesized
cagtccaagtcccacagctg

SEQ ID NO: 37386 - DNA, 20 bp, Artificial Sequence
  chemically synthesized
agtcccacagctgaagaact

SEQ ID NO: 37387 - DNA, 20 bp, Artificial Sequence
  chemically synthesized
tcccacagctgaagaacttg

SEQ ID NO: 37388 - DNA, 20 bp, Artificial Sequence
  chemically synthesized
gaacttggagtccgatgttc

SEQ ID NO: 37389 - DNA, 20 bp, Artificial Sequence
  chemically synthesized
acttggagtccgatgttcaa

SEQ ID NO: 37390 - DNA, 20 bp, Artificial Sequence
  chemically synthesized
tggagtccgatgttcaagag

SEQ ID NO: 37391 - DNA, 20 bp, Artificial Sequence
  chemically synthesized
ggagtccgatgttcaagagc

SEQ ID NO: 37392 - DNA, 20 bp, Artificial Sequence
  chemically synthesized
gtccgatgttcaagagcagg

SEQ ID NO: 37393 - DNA, 20 bp, Artificial Sequence
  chemically synthesized
tccgatgttcaagagcagga

SEQ ID NO: 37394 - DNA, 20 bp, Artificial Sequence
  chemically synthesized
gttcaagagcaggaaggatc

SEQ ID NO: 37395 - DNA, 20 bp, Artificial Sequence
  chemically synthesized
agagcaggaaggatccagca

SEQ ID NO: 37396 - DNA, 20 bp, Artificial Sequence
  chemically synthesized
gagcaggaaggatccagcac

SEQ ID NO: 37397 - DNA, 20 bp, Artificial Sequence
  chemically synthesized
gcaggaaggatccagcacag

SEQ ID NO: 37398 - DNA, 20 bp, Artificial Sequence
  chemically synthesized
gaaggatccagcacaggaga

SEQ ID NO: 37399 - DNA, 20 bp, Artificial Sequence
  chemically synthesized
tccagcacaggagaaagatg

SEQ ID NO: 37400 - DNA, 20 bp, Artificial Sequence
  chemically synthesized
ccagcacaggagaaagatgt

SEQ ID NO: 37401 - DNA, 20 bp, Artificial Sequence
  chemically synthesized
cacaggagaaagatgtaggc

SEQ ID NO: 37402 - DNA, 20 bp, Artificial Sequence
  chemically synthesized
acaggagaaagatgtaggct

SEQ ID NO: 37403 - DNA, 20 bp, Artificial Sequence
  chemically synthesized
aggagaaagatgtaggctgg

SEQ ID NO: 37404 - DNA, 20 bp, Artificial Sequence
  chemically synthesized
ggagaaagatgtaggctggg

SEQ ID NO: 37405 - DNA, 20 bp, Artificial Sequence
  chemically synthesized
aagatgtaggctgggaggct

SEQ ID NO: 37406 - DNA, 20 bp, Artificial Sequence
  chemically synthesized
tgtaggctgggaggctaagc

SEQ ID NO: 37407 - DNA, 20 bp, Artificial Sequence
  chemically synthesized
gctgggaggctaagccagtc

SEQ ID NO: 37408 - DNA, 20 bp, Artificial Sequence
  chemically synthesized
gcctttttacatttttctgc

SEQ ID NO: 37409 - DNA, 20 bp, Artificial Sequence
  chemically synthesized
tttctgccagctttatattc

SEQ ID NO: 37410 - DNA, 20 bp, Artificial Sequence
  chemically synthesized
agctttatattctggctcta

SEQ ID NO: 37411 - DNA, 20 bp, Artificial Sequence
  chemically synthesized
tatattctggctctacagct

SEQ ID NO: 37412 - DNA, 20 bp, Artificial Sequence
  chemically synthesized
atattctggctctacagctt

SEQ ID NO: 37413 - DNA, 20 bp, Artificial Sequence
  chemically synthesized
tattctggctctacagcttg

SEQ ID NO: 37414 - DNA, 20 bp, Artificial Sequence
  chemically synthesized
attctggctctacagcttgg

SEQ ID NO: 37415 - DNA, 20 bp, Artificial Sequence
  chemically synthesized
ctggctctacagcttggggg

SEQ ID NO: 37416 - DNA, 20 bp, Artificial Sequence
  chemically synthesized
gctctacagcttgggggcag

SEQ ID NO: 37417 - DNA, 20 bp, Artificial Sequence
  chemically synthesized
ctctacagcttgggggcagc

SEQ ID NO: 37418 - DNA, 20 bp, Artificial Sequence
  chemically synthesized
tctacagcttgggggcagca

SEQ ID NO: 37419 - DNA, 20 bp, Artificial Sequence
  chemically synthesized
ctacagcttgggggcagcag

SEQ ID NO: 37420 - DNA, 20 bp, Artificial Sequence
  chemically synthesized
cagcttgggggcagcagggg

SEQ ID NO: 37421 - DNA, 20 bp, Artificial Sequence
  chemically synthesized
agcttgggggcagcaggggc

SEQ ID NO: 37422 - DNA, 20 bp, Artificial Sequence
  chemically synthesized
gcttgggggcagcaggggca

SEQ ID NO: 37423 - DNA, 20 bp, Artificial Sequence
  chemically synthesized
cttgggggcagcaggggcag

SEQ ID NO: 37424 - DNA, 20 bp, Artificial Sequence
  chemically synthesized
ggcagcaggggcaggggcct

SEQ ID NO: 37425 - DNA, 20 bp, Artificial Sequence
  chemically synthesized
gcagcaggggcaggggcctc

SEQ ID NO: 37426 - DNA, 20 bp, Artificial Sequence
  chemically synthesized
cagcaggggcaggggcctca

SEQ ID NO: 37427 - DNA, 20 bp, Artificial Sequence
  chemically synthesized
caggggcctcagggtgcttg

SEQ ID NO: 37428 - DNA, 20 bp, Artificial Sequence
  chemically synthesized
aggggcctcagggtgcttgc

SEQ ID NO: 37429 - DNA, 20 bp, Artificial Sequence
  chemically synthesized
ggggcctcagggtgcttgca

SEQ ID NO: 37430 - DNA, 20 bp, Artificial Sequence
  chemically synthesized
tgcttgcagggatgacacac

SEQ ID NO: 37431 - DNA, 20 bp, Artificial Sequence
  chemically synthesized
acacactggcctcttttcca

SEQ ID NO: 37432 - DNA, 20 bp, Artificial Sequence
  chemically synthesized
cacactggcctcttttccat

SEQ ID NO: 37433 - DNA, 20 bp, Artificial Sequence
  chemically synthesized
acactggcctcttttccata

SEQ ID NO: 37434 - DNA, 20 bp, Artificial Sequence
  chemically synthesized
ctggcctcttttccataggg

SEQ ID NO: 37435 - DNA, 20 bp, Artificial Sequence
  chemically synthesized
cctcttttccatagggtggc

SEQ ID NO: 37436 - DNA, 20 bp, Artificial Sequence
  chemically synthesized
ctcttttccatagggtggct

SEQ ID NO: 37437 - DNA, 20 bp, Artificial Sequence
  chemically synthesized
tcttttccatagggtggctg

SEQ ID NO: 37438 - DNA, 20 bp, Artificial Sequence
  chemically synthesized
atagggtggctggggcacac

SEQ ID NO: 37439 - DNA, 20 bp, Artificial Sequence
  chemically synthesized
tagggtggctggggcacact

SEQ ID NO: 37440 - DNA, 20 bp, Artificial Sequence
  chemically synthesized
agggtggctggggcacactg

SEQ ID NO: 37441 - DNA, 20 bp, Artificial Sequence
  chemically synthesized
gctggggcacactggggtgt

SEQ ID NO: 37442 - DNA, 20 bp, Artificial Sequence
  chemically synthesized
ggcacactggggtgtgagta

SEQ ID NO: 37443 - DNA, 20 bp, Artificial Sequence
  chemically synthesized
tggggtgtgagtaaagcact

SEQ ID NO: 37444 - DNA, 20 bp, Artificial Sequence
  chemically synthesized
ggggtgtgagtaaagcactc

SEQ ID NO: 37445 - DNA, 20 bp, Artificial Sequence
  chemically synthesized
caggatcttttttccttccc

SEQ ID NO: 37446 - DNA, 20 bp, Artificial Sequence
  chemically synthesized
cttttttccttccctagtcc

SEQ ID NO: 37447 - DNA, 20 bp, Artificial Sequence
  chemically synthesized
ttccttccctagtccaagta

SEQ ID NO: 37448 - DNA, 20 bp, Artificial Sequence
  chemically synthesized
ttccctagtccaagtacagc

SEQ ID NO: 37449 - DNA, 20 bp, Artificial Sequence
  chemically synthesized
tccctagtccaagtacagca

SEQ ID NO: 37450 - DNA, 20 bp, Artificial Sequence
  chemically synthesized
ccctagtccaagtacagcaa

SEQ ID NO: 37451 - DNA, 20 bp, Artificial Sequence
  chemically synthesized
tagtccaagtacagcaaggg

SEQ ID NO: 37452 - DNA, 20 bp, Artificial Sequence
  chemically synthesized
cagcaagggcagtatgactg

SEQ ID NO: 37453 - DNA, 20 bp, Artificial Sequence
  chemically synthesized
gggcagtatgactgcagtgt

SEQ ID NO: 37454 - DNA, 20 bp, Artificial Sequence
  chemically synthesized
cagtatgactgcagtgttag

SEQ ID NO: 37455 - DNA, 20 bp, Artificial Sequence
  chemically synthesized
tatgactgcagtgttagtgg

SEQ ID NO: 37456 - DNA, 20 bp, Artificial Sequence
  chemically synthesized
gactgcagtgttagtggcag

SEQ ID NO: 37457 - DNA, 20 bp, Artificial Sequence
  chemically synthesized
actgcagtgttagtggcaga

SEQ ID NO: 37458 - DNA, 20 bp, Artificial Sequence
  chemically synthesized
gttagtggcagaaggacttt

SEQ ID NO: 37459 - DNA, 20 bp, Artificial Sequence
  chemically synthesized
gaaggactttcagtcacctc

SEQ ID NO: 37460 - DNA, 20 bp, Artificial Sequence
  chemically synthesized
aaggactttcagtcacctct

SEQ ID NO: 37461 - DNA, 20 bp, Artificial Sequence
  chemically synthesized
ggactttcagtcacctctgg

SEQ ID NO: 37462 - DNA, 20 bp, Artificial Sequence
  chemically synthesized
agcttcaccccacaaaaaca

SEQ ID NO: 37463 - DNA, 20 bp, Artificial Sequence
  chemically synthesized
cttcaccccacaaaaacaca

SEQ ID NO: 37464 - DNA, 20 bp, Artificial Sequence
  chemically synthesized
ccccacaaaaacacagagtg

SEQ ID NO: 37465 - DNA, 20 bp, Artificial Sequence
  chemically synthesized
acaaaaacacagagtgcagc

SEQ ID NO: 37466 - DNA, 20 bp, Artificial Sequence
  chemically synthesized
aaaacacagagtgcagccag

SEQ ID NO: 37467 - DNA, 20 bp, Artificial Sequence
  chemically synthesized
gccagtggaaatgttcaact

SEQ ID NO: 37468 - DNA, 20 bp, Artificial Sequence
  chemically synthesized
ggaaatgttcaactgagttc

SEQ ID NO: 37469 - DNA, 20 bp, Artificial Sequence
  chemically synthesized
gaaatgttcaactgagttcg

SEQ ID NO: 37470 - DNA, 20 bp, Artificial Sequence
  chemically synthesized
agttcgaggtgcctgcactg

SEQ ID NO: 37471 - DNA, 20 bp, Artificial Sequence
  chemically synthesized
gttcgaggtgcctgcactgt

SEQ ID NO: 37472 - DNA, 20 bp, Artificial Sequence
  chemically synthesized
ggtgcctgcactgtgggccc

SEQ ID NO: 37473 - DNA, 20 bp, Artificial Sequence
  chemically synthesized
cctgcactgtgggcccaagc

SEQ ID NO: 37474 - DNA, 20 bp, Artificial Sequence
  chemically synthesized
ctgcactgtgggcccaagcc

SEQ ID NO: 37475 - DNA, 20 bp, Artificial Sequence
  chemically synthesized
gcactgtgggcccaagccag

SEQ ID NO: 37476 - DNA, 20 bp, Artificial Sequence
  chemically synthesized
cccaagccaggagccttgcc

SEQ ID NO: 37477 - DNA, 20 bp, Artificial Sequence
  chemically synthesized
gccaggagccttgcctggtg

SEQ ID NO: 37478 - DNA, 20 bp, Artificial Sequence
  chemically synthesized
caggagccttgcctggtgaa

SEQ ID NO: 37479 - DNA, 20 bp, Artificial Sequence
  chemically synthesized
gagccttgcctggtgaagag

SEQ ID NO: 37480 - DNA, 20 bp, Artificial Sequence
  chemically synthesized
ccttgcctggtgaagagtag

SEQ ID NO: 37481 - DNA, 20 bp, Artificial Sequence
  chemically synthesized
cttgcctggtgaagagtagc

SEQ ID NO: 37482 - DNA, 20 bp, Artificial Sequence
  chemically synthesized
tggtgaagagtagcaggtga

SEQ ID NO: 37483 - DNA, 20 bp, Artificial Sequence
  chemically synthesized
agtagcaggtgaaagctcac

SEQ ID NO: 37484 - DNA, 20 bp, Artificial Sequence
  chemically synthesized
gcaggtgaaagctcacaaga

SEQ ID NO: 37485 - DNA, 20 bp, Artificial Sequence
  chemically synthesized
aggtgaaagctcacaagaaa

SEQ ID NO: 37486 - DNA, 20 bp, Artificial Sequence
  chemically synthesized
agctcacaagaaagagaaac

SEQ ID NO: 37487 - DNA, 20 bp, Artificial Sequence
  chemically synthesized
attctttccctgctgtgtgc

SEQ ID NO: 37488 - DNA, 20 bp, Artificial Sequence
  chemically synthesized
tctttccctgctgtgtgctg

SEQ ID NO: 37489 - DNA, 20 bp, Artificial Sequence
  chemically synthesized
ctttccctgctgtgtgctgg

SEQ ID NO: 37490 - DNA, 20 bp, Artificial Sequence
  chemically synthesized
ctgctgtgtgctggaggtgt

SEQ ID NO: 37491 - DNA, 20 bp, Artificial Sequence
  chemically synthesized
tgctgtgtgctggaggtgtc

SEQ ID NO: 37492 - DNA, 20 bp, Artificial Sequence
  chemically synthesized
gctgtgtgctggaggtgtca

SEQ ID NO: 37493 - DNA, 20 bp, Artificial Sequence
  chemically synthesized
gtgtgctggaggtgtcaggg

SEQ ID NO: 37494 - DNA, 20 bp, Artificial Sequence
  chemically synthesized
tgctggaggtgtcagggaag

SEQ ID NO: 37495 - DNA, 20 bp, Artificial Sequence
  chemically synthesized
ggaggtgtcagggaagtggc

SEQ ID NO: 37496 - DNA, 20 bp, Artificial Sequence
  chemically synthesized
gaggtgtcagggaagtggcc

SEQ ID NO: 37497 - DNA, 20 bp, Artificial Sequence
  chemically synthesized
ggccaggtcccttctttctc

SEQ ID NO: 37498 - DNA, 20 bp, Artificial Sequence
  chemically synthesized
gtcccttctttctcaagccc

SEQ ID NO: 37499 - DNA, 20 bp, Artificial Sequence
  chemically synthesized
tcccttctttctcaagccca

SEQ ID NO: 37500 - DNA, 20 bp, Artificial Sequence
  chemically synthesized
cccttctttctcaagcccaa

SEQ ID NO: 37501 - DNA, 20 bp, Artificial Sequence
  chemically synthesized
ctcaagcccaagggcattaa

SEQ ID NO: 37502 - DNA, 20 bp, Artificial Sequence
  chemically synthesized
aagcccaagggcattaacgg

SEQ ID NO: 37503 - DNA, 20 bp, Artificial Sequence
  chemically synthesized
cattaacggtggtactgctg

SEQ ID NO: 37504 - DNA, 20 bp, Artificial Sequence
  chemically synthesized
tggtactgctgcagctgaaa

SEQ ID NO: 37505 - DNA, 20 bp, Artificial Sequence
  chemically synthesized
tactgctgcagctgaaatgg

SEQ ID NO: 37506 - DNA, 20 bp, Artificial Sequence
  chemically synthesized
ctgctgcagctgaaatggca

SEQ ID NO: 37507 - DNA, 20 bp, Artificial Sequence
  chemically synthesized
tgctgcagctgaaatggcag

SEQ ID NO: 37508 - DNA, 20 bp, Artificial Sequence
  chemically synthesized
gctgcagctgaaatggcaga

SEQ ID NO: 37509 - DNA, 20 bp, Artificial Sequence
  chemically synthesized
ctgcagctgaaatggcagag

SEQ ID NO: 37510 - DNA, 20 bp, Artificial Sequence
  chemically synthesized
ctgaaatggcagaggggctg

SEQ ID NO: 37511 - DNA, 20 bp, Artificial Sequence
  chemically synthesized
tgaaatggcagaggggctgt

SEQ ID NO: 37512 - DNA, 20 bp, Artificial Sequence
  chemically synthesized
aggggctgtgggttgtctct

SEQ ID NO: 37513 - DNA, 20 bp, Artificial Sequence
  chemically synthesized
tgtctcttggatttcctccc

SEQ ID NO: 37514 - DNA, 20 bp, Artificial Sequence
  chemically synthesized
tctcttggatttcctcccca

SEQ ID NO: 37515 - DNA, 20 bp, Artificial Sequence
  chemically synthesized
cttggatttcctccccagag

SEQ ID NO: 37516 - DNA, 20 bp, Artificial Sequence
  chemically synthesized
atttcctccccagagaagca

SEQ ID NO: 37517 - DNA, 20 bp, Artificial Sequence
  chemically synthesized
ttcctccccagagaagcaca

SEQ ID NO: 37518 - DNA, 20 bp, Artificial Sequence
  chemically synthesized
ccaacactgactaaaatgtt

SEQ ID NO: 37519 - DNA, 20 bp, Artificial Sequence
  chemically synthesized
caacactgactaaaatgttc

SEQ ID NO: 37520 - DNA, 20 bp, Artificial Sequence
  chemically synthesized
cactgactaaaatgttcagg

SEQ ID NO: 37521 - DNA, 20 bp, Artificial Sequence
  chemically synthesized
actgactaaaatgttcaggc

SEQ ID NO: 37522 - DNA, 20 bp, Artificial Sequence
  chemically synthesized
ctgactaaaatgttcaggca

SEQ ID NO: 37523 - DNA, 20 bp, Artificial Sequence
  chemically synthesized
ctaaaatgttcaggcagggc

SEQ ID NO: 37524 - DNA, 20 bp, Artificial Sequence
  chemically synthesized
taaaatgttcaggcagggcc

SEQ ID NO: 37525 - DNA, 20 bp, Artificial Sequence
  chemically synthesized
aaaatgttcaggcagggcca

SEQ ID NO: 37526 - DNA, 20 bp, Artificial Sequence
  chemically synthesized
atgttcaggcagggccaggg

SEQ ID NO: 37527 - DNA, 20 bp, Artificial Sequence
  chemically synthesized
cagggtggctgtgctctgcc

SEQ ID NO: 37528 - DNA, 20 bp, Artificial Sequence
  chemically synthesized
gtggctgtgctctgcccagt

SEQ ID NO: 37529 - DNA, 20 bp, Artificial Sequence
  chemically synthesized
tggctgtgctctgcccagtg

SEQ ID NO: 37530 - DNA, 20 bp, Artificial Sequence
  chemically synthesized
gtgctctgcccagtgaggaa

SEQ ID NO: 37531 - DNA, 20 bp, Artificial Sequence
  chemically synthesized
ctctgcccagtgaggaatag

SEQ ID NO: 37532 - DNA, 20 bp, Artificial Sequence
  chemically synthesized
tctgcccagtgaggaatagt

SEQ ID NO: 37533 - DNA, 20 bp, Artificial Sequence
  chemically synthesized
ctgcccagtgaggaatagta

SEQ ID NO: 37534 - DNA, 20 bp, Artificial Sequence
  chemically synthesized
tgcccagtgaggaatagtag

SEQ ID NO: 37535 - DNA, 20 bp, Artificial Sequence
  chemically synthesized
ccagtgaggaatagtagggg

SEQ ID NO: 37536 - DNA, 20 bp, Artificial Sequence
  chemically synthesized
cagtgaggaatagtaggggc

SEQ ID NO: 37537 - DNA, 20 bp, Artificial Sequence
  chemically synthesized
agtgaggaatagtaggggca

SEQ ID NO: 37538 - DNA, 20 bp, Artificial Sequence
  chemically synthesized
ggaatagtaggggcagggac

SEQ ID NO: 37539 - DNA, 20 bp, Artificial Sequence
  chemically synthesized
agtaggggcagggaccagtg

SEQ ID NO: 37540 - DNA, 20 bp, Artificial Sequence
  chemically synthesized
gcagggaccagtgcagaaaa

SEQ ID NO: 37541 - DNA, 20 bp, Artificial Sequence
  chemically synthesized
gaccagtgcagaaaacagtg

SEQ ID NO: 37542 - DNA, 20 bp, Artificial Sequence
  chemically synthesized
cagtgtggccacttttccat

SEQ ID NO: 37543 - DNA, 20 bp, Artificial Sequence
  chemically synthesized
agtgtggccacttttccata

SEQ ID NO: 37544 - DNA, 20 bp, Artificial Sequence
  chemically synthesized
gtggccacttttccataagg

SEQ ID NO: 37545 - DNA, 20 bp, Artificial Sequence
  chemically synthesized
ataaggcagctacactgtgc

SEQ ID NO: 37546 - DNA, 20 bp, Artificial Sequence
  chemically synthesized
aaggcagctacactgtgctg

SEQ ID NO: 37547 - DNA, 20 bp, Artificial Sequence
  chemically synthesized
aggcagctacactgtgctgg

SEQ ID NO: 37548 - DNA, 20 bp, Artificial Sequence
  chemically synthesized
acactgtgctggaggtccgt

SEQ ID NO: 37549 - DNA, 20 bp, Artificial Sequence
  chemically synthesized
actgtgctggaggtccgtga

SEQ ID NO: 37550 - DNA, 20 bp, Artificial Sequence
  chemically synthesized
ggaggtccgtgagagtcctg

SEQ ID NO: 37551 - DNA, 20 bp, Artificial Sequence
  chemically synthesized
gaagctcctcgctccctcct

SEQ ID NO: 37552 - DNA, 20 bp, Artificial Sequence
  chemically synthesized
tgagcccatactttaatctc

SEQ ID NO: 37553 - DNA, 20 bp, Artificial Sequence
  chemically synthesized
agcccatactttaatctcaa

SEQ ID NO: 37554 - DNA, 20 bp, Artificial Sequence
  chemically synthesized
tactttaatctcaagagttt

SEQ ID NO: 37555 - DNA, 20 bp, Artificial Sequence
  chemically synthesized
tctcaagagtttgagataaa

SEQ ID NO: 37556 - DNA, 20 bp, Artificial Sequence
  chemically synthesized
caagagtttgagataaacag

SEQ ID NO: 37557 - DNA, 20 bp, Artificial Sequence
  chemically synthesized
agtttgagataaacagtggt

SEQ ID NO: 37558 - DNA, 20 bp, Artificial Sequence
  chemically synthesized
gtttgagataaacagtggta

SEQ ID NO: 37559 - DNA, 20 bp, Artificial Sequence
  chemically synthesized
tgagataaacagtggtaagg

SEQ ID NO: 37560 - DNA, 20 bp, Artificial Sequence
  chemically synthesized
ataaacagtggtaaggaaga

SEQ ID NO: 37561 - DNA, 20 bp, Artificial Sequence
  chemically synthesized
tggtaaggaagaaagtacaa

SEQ ID NO: 37562 - DNA, 20 bp, Artificial Sequence
  chemically synthesized
ggtaaggaagaaagtacaac

SEQ ID NO: 37563 - DNA, 20 bp, Artificial Sequence
  chemically synthesized
ggaagaaagtacaacgggta

SEQ ID NO: 37564 - DNA, 20 bp, Artificial Sequence
  chemically synthesized
cgggtacggctaatgaaacc

SEQ ID NO: 37565 - DNA, 20 bp, Artificial Sequence
  chemically synthesized
gggtacggctaatgaaaccc

SEQ ID NO: 37566 - DNA, 20 bp, Artificial Sequence
  chemically synthesized
tacggctaatgaaacccagg

SEQ ID NO: 37567 - DNA, 20 bp, Artificial Sequence
  chemically synthesized
ctaatgaaacccaggaagat

SEQ ID NO: 37568 - DNA, 20 bp, Artificial Sequence
  chemically synthesized
caggaagataagtcaatgcg

SEQ ID NO: 37569 - DNA, 20 bp, Artificial Sequence
  chemically synthesized
gaagataagtcaatgcgtag

SEQ ID NO: 37570 - DNA, 20 bp, Artificial Sequence
  chemically synthesized
gtagaagtaattccaaccta

SEQ ID NO: 37571 - DNA, 20 bp, Artificial Sequence
  chemically synthesized
ctttttaaaaatcatattta

SEQ ID NO: 37572 - DNA, 20 bp, Artificial Sequence
  chemically synthesized
ttttaaaaatcatatttata

SEQ ID NO: 37573 - DNA, 20 bp, Artificial Sequence
  chemically synthesized
tttaaaaatcatatttatag

SEQ ID NO: 37574 - DNA, 20 bp, Artificial Sequence
  chemically synthesized
atcatatttatagaggtttg

SEQ ID NO: 37575 - DNA, 20 bp, Artificial Sequence
  chemically synthesized
agaggtttgcagtgatacta

SEQ ID NO: 37576 - DNA, 20 bp, Artificial Sequence
  chemically synthesized
caatattgcaaatcattatt

SEQ ID NO: 37577 - DNA, 20 bp, Artificial Sequence
  chemically synthesized
caaatcattattaagaatac

SEQ ID NO: 37578 - DNA, 20 bp, Artificial Sequence
  chemically synthesized
atcattattaagaatacaag

SEQ ID NO: 37579 - DNA, 20 bp, Artificial Sequence
  chemically synthesized
tttctttaacacctgtgata

SEQ ID NO: 37580 - DNA, 20 bp, Artificial Sequence
  chemically synthesized
ttctttaacacctgtgatac

SEQ ID NO: 37581 - DNA, 20 bp, Artificial Sequence
  chemically synthesized
ttgatatgaattctacgtaa

SEQ ID NO: 37582 - DNA, 20 bp, Artificial Sequence
  chemically synthesized
ttgcttcttgccaccaccca

SEQ ID NO: 37583 - DNA, 20 bp, Artificial Sequence
  chemically synthesized
cttcttgccaccacccaaag

SEQ ID NO: 37584 - DNA, 20 bp, Artificial Sequence
  chemically synthesized
ttcttgccaccacccaaaga

SEQ ID NO: 37585 - DNA, 20 bp, Artificial Sequence
  chemically synthesized
accacccaaagaaggttgta

SEQ ID NO: 37586 - DNA, 20 bp, Artificial Sequence
  chemically synthesized
aaagaaggttgtatagcact

SEQ ID NO: 37587 - DNA, 20 bp, Artificial Sequence
  chemically synthesized
aactgcaaccgtgtatctct

SEQ ID NO: 37588 - DNA, 20 bp, Artificial Sequence
  chemically synthesized
actgcaaccgtgtatctctt

SEQ ID NO: 37589 - DNA, 20 bp, Artificial Sequence
  chemically synthesized
ttgccctcttccctccctat

SEQ ID NO: 37590 - DNA, 20 bp, Artificial Sequence
  chemically synthesized
cctccctatcagcatgtatc

SEQ ID NO: 37591 - DNA, 20 bp, Artificial Sequence
  chemically synthesized
ccctatcagcatgtatctag

SEQ ID NO: 37592 - DNA, 20 bp, Artificial Sequence
  chemically synthesized
gtatctagcagcattctgaa

SEQ ID NO: 37593 - DNA, 20 bp, Artificial Sequence
  chemically synthesized
attctgaaaagttaactgca

SEQ ID NO: 37594 - DNA, 20 bp, Artificial Sequence
  chemically synthesized
tgaaaagttaactgcacagt

SEQ ID NO: 37595 - DNA, 20 bp, Artificial Sequence
  chemically synthesized
actgcacagtgagcgactgc

SEQ ID NO: 37596 - DNA, 20 bp, Artificial Sequence
  chemically synthesized
ctgcacagtgagcgactgct

SEQ ID NO: 37597 - DNA, 20 bp, Artificial Sequence
  chemically synthesized
gagcgactgctgggcatctt

SEQ ID NO: 37598 - DNA, 20 bp, Artificial Sequence
  chemically synthesized
agcgactgctgggcatctta

SEQ ID NO: 37599 - DNA, 20 bp, Artificial Sequence
  chemically synthesized
gcgactgctgggcatcttaa

SEQ ID NO: 37600 - DNA, 20 bp, Artificial Sequence
  chemically synthesized
cgactgctgggcatcttaag

SEQ ID NO: 37601 - DNA, 20 bp, Artificial Sequence
  chemically synthesized
aaggggcattcttttctacc

SEQ ID NO: 37602 - DNA, 20 bp, Artificial Sequence
  chemically synthesized
aggggcattcttttctacct

SEQ ID NO: 37603 - DNA, 20 bp, Artificial Sequence
  chemically synthesized
ccccctcctccactcatgtc

SEQ ID NO: 37604 - DNA, 20 bp, Artificial Sequence
  chemically synthesized
ctccactcatgtctagcatg

SEQ ID NO: 37605 - DNA, 20 bp, Artificial Sequence
  chemically synthesized
tccactcatgtctagcatgc

SEQ ID NO: 37606 - DNA, 20 bp, Artificial Sequence
  chemically synthesized
catgtctagcatgcaggact

SEQ ID NO: 37607 - DNA, 20 bp, Artificial Sequence
  chemically synthesized
atgtctagcatgcaggactt

SEQ ID NO: 37608 - DNA, 20 bp, Artificial Sequence
  chemically synthesized
tgcaggacttgggtaatctc

SEQ ID NO: 37609 - DNA, 20 bp, Artificial Sequence
  chemically synthesized
gcaggacttgggtaatctct

SEQ ID NO: 37610 - DNA, 20 bp, Artificial Sequence
  chemically synthesized
caggacttgggtaatctctg

SEQ ID NO: 37611 - DNA, 20 bp, Artificial Sequence
  chemically synthesized
ttgggtaatctctggggttt

SEQ ID NO: 37612 - DNA, 20 bp, Artificial Sequence
  chemically synthesized
ctctggggtttcagattctc

SEQ ID NO: 37613 - DNA, 20 bp, Artificial Sequence
  chemically synthesized
tctccagacctccattctct

SEQ ID NO: 37614 - DNA, 20 bp, Artificial Sequence
  chemically synthesized
ctccagacctccattctctc

SEQ ID NO: 37615 - DNA, 20 bp, Artificial Sequence
  chemically synthesized
tccagacctccattctctca

SEQ ID NO: 37616 - DNA, 20 bp, Artificial Sequence
  chemically synthesized
ccagacctccattctctcag

SEQ ID NO: 37617 - DNA, 20 bp, Artificial Sequence
  chemically synthesized
ttccacctcctgctcatatc

SEQ ID NO: 37618 - DNA, 20 bp, Artificial Sequence
  chemically synthesized
ctcatatctagctatctgcc

SEQ ID NO: 37619 - DNA, 20 bp, Artificial Sequence
  chemically synthesized
ctaaccataaaatcttaaat

SEQ ID NO: 37620 - DNA, 20 bp, Artificial Sequence
  chemically synthesized
catgtcatgataaaaaaaat

SEQ ID NO: 37621 - DNA, 20 bp, Artificial Sequence
  chemically synthesized
taaaaaaaataagacaccat

SEQ ID NO: 37622 - DNA, 20 bp, Artificial Sequence
  chemically synthesized
aaaaaataagacaccatcag

SEQ ID NO: 37623 - DNA, 20 bp, Artificial Sequence
  chemically synthesized
tcagtggcaactgtgttgcc

SEQ ID NO: 37624 - DNA, 20 bp, Artificial Sequence
  chemically synthesized
ttgatctgctaatccctgtg

SEQ ID NO: 37625 - DNA, 20 bp, Artificial Sequence
  chemically synthesized
ccctgtgtagaaatgaacct

SEQ ID NO: 37626 - DNA, 20 bp, Artificial Sequence
  chemically synthesized
ctgtgtagaaatgaaccttg

SEQ ID NO: 37627 - DNA, 20 bp, Artificial Sequence
  chemically synthesized
tgtgtagaaatgaaccttgg

SEQ ID NO: 37628 - DNA, 20 bp, Artificial Sequence
  chemically synthesized
atttcttacaatatgtgcat

SEQ ID NO: 37629 - DNA, 20 bp, Artificial Sequence
  chemically synthesized
ttgtaacactgtcactttga

SEQ ID NO: 37630 - DNA, 20 bp, Artificial Sequence
  chemically synthesized
ctgtcactttgacagttgat

SEQ ID NO: 37631 - DNA, 20 bp, Artificial Sequence
  chemically synthesized
gttgataagcatcttctgaa

SEQ ID NO: 37632 - DNA, 20 bp, Artificial Sequence
  chemically synthesized
cttctgaatggtccctcctt

SEQ ID NO: 37633 - DNA, 20 bp, Artificial Sequence
  chemically synthesized
tcctttagttacaaaaatgt

SEQ ID NO: 37634 - DNA, 20 bp, Artificial Sequence
  chemically synthesized
gttacaaaaatgttggtgca

SEQ ID NO: 37635 - DNA, 20 bp, Artificial Sequence
  chemically synthesized
tgttggtgcatggatgatgt

SEQ ID NO: 37636 - DNA, 20 bp, Artificial Sequence
  chemically synthesized
gttggtgcatggatgatgtt

SEQ ID NO: 37637 - DNA, 20 bp, Artificial Sequence
  chemically synthesized
tgatgttgggaataaataaa

SEQ ID NO: 37638 - DNA, 20 bp, Artificial Sequence
  chemically synthesized
actaaattatgttctcatct

SEQ ID NO: 37639 - DNA, 20 bp, Artificial Sequence
  chemically synthesized
ctaaattatgttctcatctt

SEQ ID NO: 37640 - DNA, 20 bp, Artificial Sequence
  chemically synthesized
tctcatcttgggcaaaaatt

SEQ ID NO: 37641 - DNA, 20 bp, Artificial Sequence
  chemically synthesized
aaaattaagcaaaaaaaaaa

SEQ ID NO: 37642 - DNA, 20 bp, Artificial Sequence
  chemically synthesized
aattaagcaaaaaaaaaatg

SEQ ID NO: 37643 - DNA, 20 bp, Artificial Sequence
  chemically synthesized
attaagcaaaaaaaaaatgg

SEQ ID NO: 37644 - DNA, 20 bp, Artificial Sequence
  chemically synthesized
aaaaaaaaatggaggatatg

SEQ ID NO: 37645 - DNA, 20 bp, Artificial Sequence
  chemically synthesized
ggatatgaagctcctccaca

SEQ ID NO: 37646 - DNA, 20 bp, Artificial Sequence
  chemically synthesized
tatgaagctcctccacaaag

SEQ ID NO: 37647 - DNA, 20 bp, Artificial Sequence
  chemically synthesized
atgaagctcctccacaaaga

SEQ ID NO: 37648 - DNA, 20 bp, Artificial Sequence
  chemically synthesized
aaagaaggccatttttgtac

SEQ ID NO: 37649 - DNA, 20 bp, Artificial Sequence
  chemically synthesized
aagaaggccatttttgtact

SEQ ID NO: 37650 - DNA, 20 bp, Artificial Sequence
  chemically synthesized
tttttgtactaggcttacta

SEQ ID NO: 37651 - DNA, 20 bp, Artificial Sequence
  chemically synthesized
ctacagtgacacaccactat

SEQ ID NO: 37652 - DNA, 20 bp, Artificial Sequence
  chemically synthesized
agtgacacaccactattagt

SEQ ID NO: 37653 - DNA, 20 bp, Artificial Sequence
  chemically synthesized
gtgacacaccactattagtt

SEQ ID NO: 37654 - DNA, 20 bp, Artificial Sequence
  chemically synthesized
tgacacaccactattagttg

SEQ ID NO: 37655 - DNA, 20 bp, Artificial Sequence
  chemically synthesized
acacaccactattagttggg

SEQ ID NO: 37656 - DNA, 20 bp, Artificial Sequence
  chemically synthesized
actattagttggggagaatt

SEQ ID NO: 37657 - DNA, 20 bp, Artificial Sequence
  chemically synthesized
ggggagaattcagtttttcc

SEQ ID NO: 37658 - DNA, 20 bp, Artificial Sequence
  chemically synthesized
gggagaattcagtttttcca

SEQ ID NO: 37659 - DNA, 20 bp, Artificial Sequence
  chemically synthesized
cagtttttccaaggtgttga

SEQ ID NO: 37660 - DNA, 20 bp, Artificial Sequence
  chemically synthesized
agtttttccaaggtgttgat

SEQ ID NO: 37661 - DNA, 20 bp, Artificial Sequence
  chemically synthesized
ccaaggtgttgataggcatc

SEQ ID NO: 37662 - DNA, 20 bp, Artificial Sequence
  chemically synthesized
gttgataggcatccagattt

SEQ ID NO: 37663 - DNA, 20 bp, Artificial Sequence
  chemically synthesized
tgataggcatccagatttca

SEQ ID NO: 37664 - DNA, 20 bp, Artificial Sequence
  chemically synthesized
gataggcatccagatttcag

SEQ ID NO: 37665 - DNA, 20 bp, Artificial Sequence
  chemically synthesized
tttcagaggaaattgtaaaa

SEQ ID NO: 37666 - DNA, 20 bp, Artificial Sequence
  chemically synthesized
cagaggaaattgtaaaaaag

SEQ ID NO: 37667 - DNA, 20 bp, Artificial Sequence
  chemically synthesized
aattgtaaaaaagcagaacc

SEQ ID NO: 37668 - DNA, 20 bp, Artificial Sequence
  chemically synthesized
attgtaaaaaagcagaacct

SEQ ID NO: 37669 - DNA, 20 bp, Artificial Sequence
  chemically synthesized
actgcccacgatttttcttt

SEQ ID NO: 37670 - DNA, 20 bp, Artificial Sequence
  chemically synthesized
ttttctttgagatcaaatct

SEQ ID NO: 37671 - DNA, 20 bp, Artificial Sequence
  chemically synthesized
tttctttgagatcaaatctg

SEQ ID NO: 37672 - DNA, 20 bp, Artificial Sequence
  chemically synthesized
gaggcaacaaatctgttcaa

SEQ ID NO: 37673 - DNA, 20 bp, Artificial Sequence
  chemically synthesized
ttcaaaagctgctttctgcc

SEQ ID NO: 37674 - DNA, 20 bp, Artificial Sequence
  chemically synthesized
agctgctttctgcctggttg

SEQ ID NO: 37675 - DNA, 20 bp, Artificial Sequence
  chemically synthesized
ctttctgcctggttgtggca

SEQ ID NO: 37676 - DNA, 20 bp, Artificial Sequence
  chemically synthesized
tttctgcctggttgtggcaa

SEQ ID NO: 37677 - DNA, 20 bp, Artificial Sequence
  chemically synthesized
ttctgcctggttgtggcaaa

SEQ ID NO: 37678 - DNA, 20 bp, Artificial Sequence
  chemically synthesized
tgcctggttgtggcaaaggg

SEQ ID NO: 37679 - DNA, 20 bp, Artificial Sequence
  chemically synthesized
ggttgtggcaaagggtggcc

SEQ ID NO: 37680 - DNA, 20 bp, Artificial Sequence
  chemically synthesized
tgtggcaaagggtggccaag

SEQ ID NO: 37681 - DNA, 20 bp, Artificial Sequence
  chemically synthesized
gtggcaaagggtggccaagt

SEQ ID NO: 37682 - DNA, 20 bp, Artificial Sequence
  chemically synthesized
tggcaaagggtggccaagtg

SEQ ID NO: 37683 - DNA, 20 bp, Artificial Sequence
  chemically synthesized
aagggtggccaagtggggct

SEQ ID NO: 37684 - DNA, 20 bp, Artificial Sequence
  chemically synthesized
ctcagctgtgttcccattgc

SEQ ID NO: 37685 - DNA, 20 bp, Artificial Sequence
  chemically synthesized
tcagctgtgttcccattgca

SEQ ID NO: 37686 - DNA, 20 bp, Artificial Sequence
  chemically synthesized
gttcccattgcaaggctact

SEQ ID NO: 37687 - DNA, 20 bp, Artificial Sequence
  chemically synthesized
tactgagcatcccctgtcct

SEQ ID NO: 37688 - DNA, 20 bp, Artificial Sequence
  chemically synthesized
actgagcatcccctgtcctg

SEQ ID NO: 37689 - DNA, 20 bp, Artificial Sequence
  chemically synthesized
tcccctgtcctgaggctcct

SEQ ID NO: 37690 - DNA, 20 bp, Artificial Sequence
  chemically synthesized
cccctgtcctgaggctcctt

SEQ ID NO: 37691 - DNA, 20 bp, Artificial Sequence
  chemically synthesized
ctgaggctccttaggacacc

SEQ ID NO: 37692 - DNA, 20 bp, Artificial Sequence
  chemically synthesized
gctccttaggacacctggct

SEQ ID NO: 37693 - DNA, 20 bp, Artificial Sequence
  chemically synthesized
taggacacctggctgagctt

SEQ ID NO: 37694 - DNA, 20 bp, Artificial Sequence
  chemically synthesized
gacacctggctgagcttcag

SEQ ID NO: 37695 - DNA, 20 bp, Artificial Sequence
  chemically synthesized
agcttcagcagccctcttcc

SEQ ID NO: 37696 - DNA, 20 bp, Artificial Sequence
  chemically synthesized
cagcagccctcttccaagcc

SEQ ID NO: 37697 - DNA, 20 bp, Artificial Sequence
  chemically synthesized
gcagccctcttccaagcctg

SEQ ID NO: 37698 - DNA, 20 bp, Artificial Sequence
  chemically synthesized
tcttccaagcctggagatgc

SEQ ID NO: 37699 - DNA, 20 bp, Artificial Sequence
  chemically synthesized
ggagatgccagctccatctc

SEQ ID NO: 37700 - DNA, 20 bp, Artificial Sequence
  chemically synthesized
tccatctctggcacaaaatg

SEQ ID NO: 37701 - DNA, 20 bp, Artificial Sequence
  chemically synthesized
acaaaatgtagtgattttca

SEQ ID NO: 37702 - DNA, 20 bp, Artificial Sequence
  chemically synthesized
caaaatgtagtgattttcac

SEQ ID NO: 37703 - DNA, 20 bp, Artificial Sequence
  chemically synthesized
aaaatgtagtgattttcaca

SEQ ID NO: 37704 - DNA, 20 bp, Artificial Sequence
  chemically synthesized
tgtagtgattttcacagggt

SEQ ID NO: 37705 - DNA, 20 bp, Artificial Sequence
  chemically synthesized
tagtgattttcacagggtga

SEQ ID NO: 37706 - DNA, 20 bp, Artificial Sequence
  chemically synthesized
agtgattttcacagggtgag

SEQ ID NO: 37707 - DNA, 20 bp, Artificial Sequence
  chemically synthesized
ttcacagggtgagaggccaa

SEQ ID NO: 37708 - DNA, 20 bp, Artificial Sequence
  chemically synthesized
cacagggtgagaggccaaaa

SEQ ID NO: 37709 - DNA, 20 bp, Artificial Sequence
  chemically synthesized
acagggtgagaggccaaaag

SEQ ID NO: 37710 - DNA, 20 bp, Artificial Sequence
  chemically synthesized
caaaagaggctaataaaatg

SEQ ID NO: 37711 - DNA, 20 bp, Artificial Sequence
  chemically synthesized
agaggctaataaaatgaaga

SEQ ID NO: 37712 - DNA, 20 bp, Artificial Sequence
  chemically synthesized
ctaataaaatgaagatagcc

SEQ ID NO: 37713 - DNA, 20 bp, Artificial Sequence
  chemically synthesized
tgaagatagccaagcttcca

SEQ ID NO: 37714 - DNA, 20 bp, Artificial Sequence
  chemically synthesized
agccaagcttccatggaatt

SEQ ID NO: 37715 - DNA, 20 bp, Artificial Sequence
  chemically synthesized
gcttccatggaattaagcaa

SEQ ID NO: 37716 - DNA, 20 bp, Artificial Sequence
  chemically synthesized
cttccatggaattaagcaac

SEQ ID NO: 37717 - DNA, 20 bp, Artificial Sequence
  chemically synthesized
aggacaaccttgaccacttt

SEQ ID NO: 37718 - DNA, 20 bp, Artificial Sequence
  chemically synthesized
ggacaaccttgaccactttg

SEQ ID NO: 37719 - DNA, 20 bp, Artificial Sequence
  chemically synthesized
gacaaccttgaccactttga

SEQ ID NO: 37720 - DNA, 20 bp, Artificial Sequence
  chemically synthesized
acaaccttgaccactttgag

SEQ ID NO: 37721 - DNA, 20 bp, Artificial Sequence
  chemically synthesized
cttgaccactttgaggggtg

SEQ ID NO: 37722 - DNA, 20 bp, Artificial Sequence
  chemically synthesized
gaccactttgaggggtgtgg

SEQ ID NO: 37723 - DNA, 20 bp, Artificial Sequence
  chemically synthesized
accactttgaggggtgtggt

SEQ ID NO: 37724 - DNA, 20 bp, Artificial Sequence
  chemically synthesized
ccactttgaggggtgtggtg

SEQ ID NO: 37725 - DNA, 20 bp, Artificial Sequence
  chemically synthesized
cactttgaggggtgtggtgg

SEQ ID NO: 37726 - DNA, 20 bp, Artificial Sequence
  chemically synthesized
ggtgtggtgggggccacatg

SEQ ID NO: 37727 - DNA, 20 bp, Artificial Sequence
  chemically synthesized
tggtgggggccacatgcaga

SEQ ID NO: 37728 - DNA, 20 bp, Artificial Sequence
  chemically synthesized
gtgggggccacatgcagatg

SEQ ID NO: 37729 - DNA, 20 bp, Artificial Sequence
  chemically synthesized
ggggccacatgcagatggag

SEQ ID NO: 37730 - DNA, 20 bp, Artificial Sequence
  chemically synthesized
gggccacatgcagatggagt

SEQ ID NO: 37731 - DNA, 20 bp, Artificial Sequence
  chemically synthesized
catgcagatggagtgggtta

SEQ ID NO: 37732 - DNA, 20 bp, Artificial Sequence
  chemically synthesized
tgcagatggagtgggttaaa

SEQ ID NO: 37733 - DNA, 20 bp, Artificial Sequence
  chemically synthesized
ggagtgggttaaagagtgac

SEQ ID NO: 37734 - DNA, 20 bp, Artificial Sequence
  chemically synthesized
gtgggttaaagagtgactag

SEQ ID NO: 37735 - DNA, 20 bp, Artificial Sequence
  chemically synthesized
gggttaaagagtgactagaa

SEQ ID NO: 37736 - DNA, 20 bp, Artificial Sequence
  chemically synthesized
ttaaagagtgactagaagag

SEQ ID NO: 37737 - DNA, 20 bp, Artificial Sequence
  chemically synthesized
aagagtgactagaagagcag

SEQ ID NO: 37738 - DNA, 20 bp, Artificial Sequence
  chemically synthesized
agagtgactagaagagcagt

SEQ ID NO: 37739 - DNA, 20 bp, Artificial Sequence
  chemically synthesized
gagtgactagaagagcagtg

SEQ ID NO: 37740 - DNA, 20 bp, Artificial Sequence
  chemically synthesized
agtgactagaagagcagtgg

SEQ ID NO: 37741 - DNA, 20 bp, Artificial Sequence
  chemically synthesized
gactagaagagcagtggggg

SEQ ID NO: 37742 - DNA, 20 bp, Artificial Sequence
  chemically synthesized
tagaagagcagtgggggtgg

SEQ ID NO: 37743 - DNA, 20 bp, Artificial Sequence
  chemically synthesized
aagagcagtgggggtggcag

SEQ ID NO: 37744 - DNA, 20 bp, Artificial Sequence
  chemically synthesized
agagcagtgggggtggcagc

SEQ ID NO: 37745 - DNA, 20 bp, Artificial Sequence
  chemically synthesized
agcagtgggggtggcagcag

SEQ ID NO: 37746 - DNA, 20 bp, Artificial Sequence
  chemically synthesized
cagtgggggtggcagcagga

SEQ ID NO: 37747 - DNA, 20 bp, Artificial Sequence
  chemically synthesized
tgggggtggcagcaggagag

SEQ ID NO: 37748 - DNA, 20 bp, Artificial Sequence
  chemically synthesized
gtggcagcaggagagaagcc

SEQ ID NO: 37749 - DNA, 20 bp, Artificial Sequence
  chemically synthesized
ggagagaagcctggctctga

SEQ ID NO: 37750 - DNA, 20 bp, Artificial Sequence
  chemically synthesized
gagaagcctggctctgaaag

SEQ ID NO: 37751 - DNA, 20 bp, Artificial Sequence
  chemically synthesized
agcctggctctgaaagcagc

SEQ ID NO: 37752 - DNA, 20 bp, Artificial Sequence
  chemically synthesized
tctgaaagcagcgagacttc

SEQ ID NO: 37753 - DNA, 20 bp, Artificial Sequence
  chemically synthesized
ctgaaagcagcgagacttct

SEQ ID NO: 37754 - DNA, 20 bp, Artificial Sequence
  chemically synthesized
tgaaagcagcgagacttcta

SEQ ID NO: 37755 - DNA, 20 bp, Artificial Sequence
  chemically synthesized
agcgagacttctagggaata

SEQ ID NO: 37756 - DNA, 20 bp, Artificial Sequence
  chemically synthesized
gcgagacttctagggaatac

SEQ ID NO: 37757 - DNA, 20 bp, Artificial Sequence
  chemically synthesized
cgagacttctagggaataca

SEQ ID NO: 37758 - DNA, 20 bp, Artificial Sequence
  chemically synthesized
acttctagggaatacagggt

SEQ ID NO: 37759 - DNA, 20 bp, Artificial Sequence
  chemically synthesized
cttctagggaatacagggtc

SEQ ID NO: 37760 - DNA, 20 bp, Artificial Sequence
  chemically synthesized
ttctagggaatacagggtca

SEQ ID NO: 37761 - DNA, 20 bp, Artificial Sequence
  chemically synthesized
tctagggaatacagggtcag

SEQ ID NO: 37762 - DNA, 20 bp, Artificial Sequence
  chemically synthesized
tagggaatacagggtcaggg

SEQ ID NO: 37763 - DNA, 20 bp, Artificial Sequence
  chemically synthesized
agggaatacagggtcagggg

SEQ ID NO: 37764 - DNA, 20 bp, Artificial Sequence
  chemically synthesized
agggtcaggggaggttctga

SEQ ID NO: 37765 - DNA, 20 bp, Artificial Sequence
  chemically synthesized
ttctgaaagatgacacactg

SEQ ID NO: 37766 - DNA, 20 bp, Artificial Sequence
  chemically synthesized
ctgaaagatgacacactgca

SEQ ID NO: 37767 - DNA, 20 bp, Artificial Sequence
  chemically synthesized
tgtgtttgtatgccgatgac

SEQ ID NO: 37768 - DNA, 20 bp, Artificial Sequence
  chemically synthesized
gtatgccgatgacaagtatc

SEQ ID NO: 37769 - DNA, 20 bp, Artificial Sequence
  chemically synthesized
tgccgatgacaagtatccag

SEQ ID NO: 37770 - DNA, 20 bp, Artificial Sequence
  chemically synthesized
gatgacaagtatccagtaga

SEQ ID NO: 37771 - DNA, 20 bp, Artificial Sequence
  chemically synthesized
atgacaagtatccagtagaa

SEQ ID NO: 37772 - DNA, 20 bp, Artificial Sequence
  chemically synthesized
acaagtatccagtagaaagg

SEQ ID NO: 37773 - DNA, 20 bp, Artificial Sequence
  chemically synthesized
ccagtagaaaggcagatgaa

SEQ ID NO: 37774 - DNA, 20 bp, Artificial Sequence
  chemically synthesized
gatgaacagattctcattct

SEQ ID NO: 37775 - DNA, 20 bp, Artificial Sequence
  chemically synthesized
aacagattctcattctcaga

SEQ ID NO: 37776 - DNA, 20 bp, Artificial Sequence
  chemically synthesized
acagattctcattctcagaa

SEQ ID NO: 37777 - DNA, 20 bp, Artificial Sequence
  chemically synthesized
aaggcctgtcctgacctcct

SEQ ID NO: 37778 - DNA, 20 bp, Artificial Sequence
  chemically synthesized
ggcctgtcctgacctcctga

SEQ ID NO: 37779 - DNA, 20 bp, Artificial Sequence
  chemically synthesized
cctgacctcctgagagtaca

SEQ ID NO: 37780 - DNA, 20 bp, Artificial Sequence
  chemically synthesized
cctgagagtacacagaccat

SEQ ID NO: 37781 - DNA, 20 bp, Artificial Sequence
  chemically synthesized
ctgagagtacacagaccatg

SEQ ID NO: 37782 - DNA, 20 bp, Artificial Sequence
  chemically synthesized
tgagagtacacagaccatga

SEQ ID NO: 37783 - DNA, 20 bp, Artificial Sequence
  chemically synthesized
gagtacacagaccatgaggg

SEQ ID NO: 37784 - DNA, 20 bp, Artificial Sequence
  chemically synthesized
agtacacagaccatgagggc

SEQ ID NO: 37785 - DNA, 20 bp, Artificial Sequence
  chemically synthesized
gtacacagaccatgagggca

SEQ ID NO: 37786 - DNA, 20 bp, Artificial Sequence
  chemically synthesized
acagaccatgagggcagggc

SEQ ID NO: 37787 - DNA, 20 bp, Artificial Sequence
  chemically synthesized
cagaccatgagggcagggca

SEQ ID NO: 37788 - DNA, 20 bp, Artificial Sequence
  chemically synthesized
gaccatgagggcagggcaag

SEQ ID NO: 37789 - DNA, 20 bp, Artificial Sequence
  chemically synthesized
accatgagggcagggcaagg

SEQ ID NO: 37790 - DNA, 20 bp, Artificial Sequence
  chemically synthesized
catgagggcagggcaaggag

SEQ ID NO: 37791 - DNA, 20 bp, Artificial Sequence
  chemically synthesized
atgagggcagggcaaggagg

SEQ ID NO: 37792 - DNA, 20 bp, Artificial Sequence
  chemically synthesized
cacgctcactgtttcatgca

SEQ ID NO: 37793 - DNA, 20 bp, Artificial Sequence
  chemically synthesized
actgtttcatgcaaagtcct

SEQ ID NO: 37794 - DNA, 20 bp, Artificial Sequence
  chemically synthesized
tcatgcaaagtccttggcca

SEQ ID NO: 37795 - DNA, 20 bp, Artificial Sequence
  chemically synthesized
caatttaatatgctctatgc

SEQ ID NO: 37796 - DNA, 20 bp, Artificial Sequence
  chemically synthesized
tatgctctatgctggaaaac

SEQ ID NO: 37797 - DNA, 20 bp, Artificial Sequence
  chemically synthesized
tggaaaactggattattgaa

SEQ ID NO: 37798 - DNA, 20 bp, Artificial Sequence
  chemically synthesized
ggaaaactggattattgaac

SEQ ID NO: 37799 - DNA, 20 bp, Artificial Sequence
  chemically synthesized
ctggattattgaacaggcat

SEQ ID NO: 37800 - DNA, 20 bp, Artificial Sequence
  chemically synthesized
tctgaacctaatccactaaa

SEQ ID NO: 37801 - DNA, 20 bp, Artificial Sequence
  chemically synthesized
atccactaaaaagcacttga

SEQ ID NO: 37802 - DNA, 20 bp, Artificial Sequence
  chemically synthesized
agatatatcaaaatatcatt

SEQ ID NO: 37803 - DNA, 20 bp, Artificial Sequence
  chemically synthesized
atcaaaatatcattgagaaa

SEQ ID NO: 37804 - DNA, 20 bp, Artificial Sequence
  chemically synthesized
tcattgagaaatagatattt

SEQ ID NO: 37805 - DNA, 20 bp, Artificial Sequence
  chemically synthesized
cattgagaaatagatatttt

SEQ ID NO: 37806 - DNA, 20 bp, Artificial Sequence
  chemically synthesized
ctcatttgaactctcttttc

SEQ ID NO: 37807 - DNA, 20 bp, Artificial Sequence
  chemically synthesized
tcatttgaactctcttttcc

SEQ ID NO: 37808 - DNA, 20 bp, Artificial Sequence
  chemically synthesized
tttgaactctcttttccagg

SEQ ID NO: 37809 - DNA, 20 bp, Artificial Sequence
  chemically synthesized
tgaactctcttttccaggaa

SEQ ID NO: 37810 - DNA, 20 bp, Artificial Sequence
  chemically synthesized
tttccaggaagagttgtgct

SEQ ID NO: 37811 - DNA, 20 bp, Artificial Sequence
  chemically synthesized
ttccaggaagagttgtgctt

SEQ ID NO: 37812 - DNA, 20 bp, Artificial Sequence
  chemically synthesized
ttgtgcttgggtaaattcta

SEQ ID NO: 37813 - DNA, 20 bp, Artificial Sequence
  chemically synthesized
tgggtaaattctatagctca

SEQ ID NO: 37814 - DNA, 20 bp, Artificial Sequence
  chemically synthesized
aaaacacacaataaattaat

SEQ ID NO: 37815 - DNA, 20 bp, Artificial Sequence
  chemically synthesized
aaacacacaataaattaata

SEQ ID NO: 37816 - DNA, 20 bp, Artificial Sequence
  chemically synthesized
aattaataaggtgcttccta

SEQ ID NO: 37817 - DNA, 20 bp, Artificial Sequence
  chemically synthesized
aataaggtgcttcctacagt

SEQ ID NO: 37818 - DNA, 20 bp, Artificial Sequence
  chemically synthesized
ggtgcttcctacagtgagtt

SEQ ID NO: 37819 - DNA, 20 bp, Artificial Sequence
  chemically synthesized
gagttcagttaaacattttg

SEQ ID NO: 37820 - DNA, 20 bp, Artificial Sequence
  chemically synthesized
gttcagttaaacattttgaa

SEQ ID NO: 37821 - DNA, 20 bp, Artificial Sequence
  chemically synthesized
tgaagagtgtttttgaaatg

SEQ ID NO: 37822 - DNA, 20 bp, Artificial Sequence
  chemically synthesized
agagtgtttttgaaatgtag

SEQ ID NO: 37823 - DNA, 20 bp, Artificial Sequence
  chemically synthesized
agtgtttttgaaatgtagca

SEQ ID NO: 37824 - DNA, 20 bp, Artificial Sequence
  chemically synthesized
gtttttgaaatgtagcagag

SEQ ID NO: 37825 - DNA, 20 bp, Artificial Sequence
  chemically synthesized
tttttgaaatgtagcagagc

SEQ ID NO: 37826 - DNA, 20 bp, Artificial Sequence
  chemically synthesized
ggctacaattgatattcaaa

SEQ ID NO: 37827 - DNA, 20 bp, Artificial Sequence
  chemically synthesized
ctacaattgatattcaaaaa

SEQ ID NO: 37828 - DNA, 20 bp, Artificial Sequence
  chemically synthesized
tacaattgatattcaaaaag

SEQ ID NO: 37829 - DNA, 20 bp, Artificial Sequence
  chemically synthesized
atttatttccccctttaact

SEQ ID NO: 37830 - DNA, 20 bp, Artificial Sequence
  chemically synthesized
tgtcattttattatgcttca

SEQ ID NO: 37831 - DNA, 20 bp, Artificial Sequence
  chemically synthesized
tcattttattatgcttcata

SEQ ID NO: 37832 - DNA, 20 bp, Artificial Sequence
  chemically synthesized
cttcatagagcatcactgct

SEQ ID NO: 37833 - DNA, 20 bp, Artificial Sequence
  chemically synthesized
cactgctgagatcccctccc

SEQ ID NO: 37834 - DNA, 20 bp, Artificial Sequence
  chemically synthesized
ccctccccagctcatgttgc

SEQ ID NO: 37835 - DNA, 20 bp, Artificial Sequence
  chemically synthesized
cctccccagctcatgttgct

SEQ ID NO: 37836 - DNA, 20 bp, Artificial Sequence
  chemically synthesized
tgctaggaaatatcccaaaa

SEQ ID NO: 37837 - DNA, 20 bp, Artificial Sequence
  chemically synthesized
ttgtttctctgattcacctc

SEQ ID NO: 37838 - DNA, 20 bp, Artificial Sequence
  chemically synthesized
tgtttctctgattcacctcc

SEQ ID NO: 37839 - DNA, 20 bp, Artificial Sequence
  chemically synthesized
gtttctctgattcacctcca

SEQ ID NO: 37840 - DNA, 20 bp, Artificial Sequence
  chemically synthesized
attcacctccagggctcata

SEQ ID NO: 37841 - DNA, 20 bp, Artificial Sequence
  chemically synthesized
ctccagggctcatatggcaa

SEQ ID NO: 37842 - DNA, 20 bp, Artificial Sequence
  chemically synthesized
tccagggctcatatggcaat

SEQ ID NO: 37843 - DNA, 20 bp, Artificial Sequence
  chemically synthesized
ccagggctcatatggcaatg

SEQ ID NO: 37844 - DNA, 20 bp, Artificial Sequence
  chemically synthesized
atatggcaatggggatttaa

SEQ ID NO: 37845 - DNA, 20 bp, Artificial Sequence
  chemically synthesized
tatggcaatggggatttaat

SEQ ID NO: 37846 - DNA, 20 bp, Artificial Sequence
  chemically synthesized
atggcaatggggatttaata

SEQ ID NO: 37847 - DNA, 20 bp, Artificial Sequence
  chemically synthesized
atttaatagggtttatttgt

SEQ ID NO: 37848 - DNA, 20 bp, Artificial Sequence
  chemically synthesized
atagggtttatttgttggtg

SEQ ID NO: 37849 - DNA, 20 bp, Artificial Sequence
  chemically synthesized
acattaaacaaatcttttaa

SEQ ID NO: 37850 - DNA, 20 bp, Artificial Sequence
  chemically synthesized
cattaaacaaatcttttaat

SEQ ID NO: 37851 - DNA, 20 bp, Artificial Sequence
  chemically synthesized
ggaaaaatacttttatatta

SEQ ID NO: 37852 - DNA, 20 bp, Artificial Sequence
  chemically synthesized
gaaaaatacttttatattat

SEQ ID NO: 37853 - DNA, 20 bp, Artificial Sequence
  chemically synthesized
tttatattataggcaaaatg

SEQ ID NO: 37854 - DNA, 20 bp, Artificial Sequence
  chemically synthesized
gtagatgtatattgctactg

SEQ ID NO: 37855 - DNA, 20 bp, Artificial Sequence
  chemically synthesized
aagtaaatgtattttattaa

SEQ ID NO: 37856 - DNA, 20 bp, Artificial Sequence
  chemically synthesized
atgtattttattaatggtgt

SEQ ID NO: 37857 - DNA, 20 bp, Artificial Sequence
  chemically synthesized
tgagaatttcttcctcactg

SEQ ID NO: 37858 - DNA, 20 bp, Artificial Sequence
  chemically synthesized
atgcatatttgcatgtgtaa

SEQ ID NO: 37859 - DNA, 20 bp, Artificial Sequence
  chemically synthesized
atttgcatgtgtaaaagact

SEQ ID NO: 37860 - DNA, 20 bp, Artificial Sequence
  chemically synthesized
aagacttagcaatttgtgaa

SEQ ID NO: 37861 - DNA, 20 bp, Artificial Sequence
  chemically synthesized
acttagcaatttgtgaatag

SEQ ID NO: 37862 - DNA, 20 bp, Artificial Sequence
  chemically synthesized
atgtttctccgcttctcact

SEQ ID NO: 37863 - DNA, 20 bp, Artificial Sequence
  chemically synthesized
tctccgcttctcactgagca

SEQ ID NO: 37864 - DNA, 20 bp, Artificial Sequence
  chemically synthesized
ctcactgagcatggctgtaa

SEQ ID NO: 37865 - DNA, 20 bp, Artificial Sequence
  chemically synthesized
aagaaactttttcctctccc

SEQ ID NO: 37866 - DNA, 20 bp, Artificial Sequence
  chemically synthesized
agaaactttttcctctcccc

SEQ ID NO: 37867 - DNA, 20 bp, Artificial Sequence
  chemically synthesized
tttcctctccccgggcattc

SEQ ID NO: 37868 - DNA, 20 bp, Artificial Sequence
  chemically synthesized
ccgggcattccagcacacat

SEQ ID NO: 37869 - DNA, 20 bp, Artificial Sequence
  chemically synthesized
gcattccagcacacattgga

SEQ ID NO: 37870 - DNA, 20 bp, Artificial Sequence
  chemically synthesized
ttggaaagataacacgtcca

SEQ ID NO: 37871 - DNA, 20 bp, Artificial Sequence
  chemically synthesized
aaagataacacgtccacaga

SEQ ID NO: 37872 - DNA, 20 bp, Artificial Sequence
  chemically synthesized
taacacgtccacagaaagcc

SEQ ID NO: 37873 - DNA, 20 bp, Artificial Sequence
  chemically synthesized
cagaaagcctggctttccaa

SEQ ID NO: 37874 - DNA, 20 bp, Artificial Sequence
  chemically synthesized
gaaagcctggctttccaaaa

SEQ ID NO: 37875 - DNA, 20 bp, Artificial Sequence
  chemically synthesized
ggctttccaaaagagcttat

SEQ ID NO: 37876 - DNA, 20 bp, Artificial Sequence
  chemically synthesized
ctttccaaaagagcttatca

SEQ ID NO: 37877 - DNA, 20 bp, Artificial Sequence
  chemically synthesized
ttatcagagaatgtgccccc

SEQ ID NO: 37878 - DNA, 20 bp, Artificial Sequence
  chemically synthesized
tatcagagaatgtgcccccc

SEQ ID NO: 37879 - DNA, 20 bp, Artificial Sequence
  chemically synthesized
taaaacatatgttaatcctg

SEQ ID NO: 37880 - DNA, 20 bp, Artificial Sequence
  chemically synthesized
aacatatgttaatcctgtgg

SEQ ID NO: 37881 - DNA, 20 bp, Artificial Sequence
  chemically synthesized
catatgttaatcctgtggca

SEQ ID NO: 37882 - DNA, 20 bp, Artificial Sequence
  chemically synthesized
atgttaatcctgtggcagag

SEQ ID NO: 37883 - DNA, 20 bp, Artificial Sequence
  chemically synthesized
tgtggcagagaagtttgttc

SEQ ID NO: 37884 - DNA, 20 bp, Artificial Sequence
  chemically synthesized
gagaagtttgttctagcctt

SEQ ID NO: 37885 - DNA, 20 bp, Artificial Sequence
  chemically synthesized
agaagtttgttctagccttt

SEQ ID NO: 37886 - DNA, 20 bp, Artificial Sequence
  chemically synthesized
tttgttctagcctttgggtg

SEQ ID NO: 37887 - DNA, 20 bp, Artificial Sequence
  chemically synthesized
ttgggtgtagcctgctgaat

SEQ ID NO: 37888 - DNA, 20 bp, Artificial Sequence
  chemically synthesized
tagcctgctgaataagttca

SEQ ID NO: 37889 - DNA, 20 bp, Artificial Sequence
  chemically synthesized
gttcacagtgatctacatcc

SEQ ID NO: 37890 - DNA, 20 bp, Artificial Sequence
  chemically synthesized
gatctacatcctagtttcca

SEQ ID NO: 37891 - DNA, 20 bp, Artificial Sequence
  chemically synthesized
atctacatcctagtttccat

SEQ ID NO: 37892 - DNA, 20 bp, Artificial Sequence
  chemically synthesized
ctagtttccatgggctgaaa

SEQ ID NO: 37893 - DNA, 20 bp, Artificial Sequence
  chemically synthesized
ccctgcactccctacacaca

SEQ ID NO: 37894 - DNA, 20 bp, Artificial Sequence
  chemically synthesized
actccctacacacacagaca

SEQ ID NO: 37895 - DNA, 20 bp, Artificial Sequence
  chemically synthesized
ttctttgatattttcttgaa

SEQ ID NO: 37896 - DNA, 20 bp, Artificial Sequence
  chemically synthesized
ttcaaatgtgtttgacttta

SEQ ID NO: 37897 - DNA, 20 bp, Artificial Sequence
  chemically synthesized
tcaacttgtaaaattttatc

SEQ ID NO: 37898 - DNA, 20 bp, Artificial Sequence
  chemically synthesized
aaattttatctggtaattta

SEQ ID NO: 37899 - DNA, 20 bp, Artificial Sequence
  chemically synthesized
taatttatagattaaattgc

SEQ ID NO: 37900 - DNA, 20 bp, Artificial Sequence
  chemically synthesized
agcatctacctccctttcat

SEQ ID NO: 37901 - DNA, 20 bp, Artificial Sequence
  chemically synthesized
ctttcatcagactctccctg

SEQ ID NO: 37902 - DNA, 20 bp, Artificial Sequence
  chemically synthesized
tttcatcagactctccctgc

SEQ ID NO: 37903 - DNA, 20 bp, Artificial Sequence
  chemically synthesized
ttcatcagactctccctgca

SEQ ID NO: 37904 - DNA, 20 bp, Artificial Sequence
  chemically synthesized
tcagactctccctgcagggc

SEQ ID NO: 37905 - DNA, 20 bp, Artificial Sequence
  chemically synthesized
tctaactatgtatgtgcttc

SEQ ID NO: 37906 - DNA, 20 bp, Artificial Sequence
  chemically synthesized
actatgtatgtgcttcaaga

SEQ ID NO: 37907 - DNA, 20 bp, Artificial Sequence
  chemically synthesized
tgcttcaagatggaactcct

SEQ ID NO: 37908 - DNA, 20 bp, Artificial Sequence
  chemically synthesized
agatggaactcctgagttca

SEQ ID NO: 37909 - DNA, 20 bp, Artificial Sequence
  chemically synthesized
gatggaactcctgagttcac

SEQ ID NO: 37910 - DNA, 20 bp, Artificial Sequence
  chemically synthesized
cacaggtgatttataaacca

SEQ ID NO: 37911 - DNA, 20 bp, Artificial Sequence
  chemically synthesized
actacaaaactctcaccctc

SEQ ID NO: 37912 - DNA, 20 bp, Artificial Sequence
  chemically synthesized
tacaaaactctcaccctcca

SEQ ID NO: 37913 - DNA, 20 bp, Artificial Sequence
  chemically synthesized
accctccagagatttgcctc

SEQ ID NO: 37914 - DNA, 20 bp, Artificial Sequence
  chemically synthesized
ccctccagagatttgcctca

SEQ ID NO: 37915 - DNA, 20 bp, Artificial Sequence
  chemically synthesized
cctccagagatttgcctcaa

SEQ ID NO: 37916 - DNA, 20 bp, Artificial Sequence
  chemically synthesized
gggacaacaccctgctcaca

SEQ ID NO: 37917 - DNA, 20 bp, Artificial Sequence
  chemically synthesized
ggacaacaccctgctcacaa

SEQ ID NO: 37918 - DNA, 20 bp, Artificial Sequence
  chemically synthesized
caccctgctcacaaaggcac

SEQ ID NO: 37919 - DNA, 20 bp, Artificial Sequence
  chemically synthesized
cctgctcacaaaggcaccag

SEQ ID NO: 37920 - DNA, 20 bp, Artificial Sequence
  chemically synthesized
ctgctcacaaaggcaccagc

SEQ ID NO: 37921 - DNA, 20 bp, Artificial Sequence
  chemically synthesized
caggcaactgctcaactacc

SEQ ID NO: 37922 - DNA, 20 bp, Artificial Sequence
  chemically synthesized
gcaactgctcaactacctgg

SEQ ID NO: 37923 - DNA, 20 bp, Artificial Sequence
  chemically synthesized
tgctcaactacctggtggat

SEQ ID NO: 37924 - DNA, 20 bp, Artificial Sequence
  chemically synthesized
gctcaactacctggtggata

SEQ ID NO: 37925 - DNA, 20 bp, Artificial Sequence
  chemically synthesized
acctggtggataaggtgccc

SEQ ID NO: 37926 - DNA, 20 bp, Artificial Sequence
  chemically synthesized
ggtggataaggtgcccaagc

SEQ ID NO: 37927 - DNA, 20 bp, Artificial Sequence
  chemically synthesized
ataaggtgcccaagctagca

SEQ ID NO: 37928 - DNA, 20 bp, Artificial Sequence
  chemically synthesized
cctcctctgttgccttttaa

SEQ ID NO: 37929 - DNA, 20 bp, Artificial Sequence
  chemically synthesized
agtgccactttctgctccta

SEQ ID NO: 37930 - DNA, 20 bp, Artificial Sequence
  chemically synthesized
cactttctgctcctaaagtg

SEQ ID NO: 37931 - DNA, 20 bp, Artificial Sequence
  chemically synthesized
tttctgctcctaaagtgaag

SEQ ID NO: 37932 - DNA, 20 bp, Artificial Sequence
  chemically synthesized
gctcctaaagtgaagtagta

SEQ ID NO: 37933 - DNA, 20 bp, Artificial Sequence
  chemically synthesized
cctaaagtgaagtagtacgg

SEQ ID NO: 37934 - DNA, 20 bp, Artificial Sequence
  chemically synthesized
ctaaagtgaagtagtacggc

SEQ ID NO: 37935 - DNA, 20 bp, Artificial Sequence
  chemically synthesized
actgctgcatttcttcccct

SEQ ID NO: 37936 - DNA, 20 bp, Artificial Sequence
  chemically synthesized
ctgcatttcttcccctaagc

SEQ ID NO: 37937 - DNA, 20 bp, Artificial Sequence
  chemically synthesized
ttcttcccctaagctagctt

SEQ ID NO: 37938 - DNA, 20 bp, Artificial Sequence
  chemically synthesized
ttcccctaagctagctttgg

SEQ ID NO: 37939 - DNA, 20 bp, Artificial Sequence
  chemically synthesized
gcaaatcactttctttatac

SEQ ID NO: 37940 - DNA, 20 bp, Artificial Sequence
  chemically synthesized
cagacttctctcttcttaat

SEQ ID NO: 37941 - DNA, 20 bp, Artificial Sequence
  chemically synthesized
tcttcttaattggattctgc

SEQ ID NO: 37942 - DNA, 20 bp, Artificial Sequence
  chemically synthesized
tcttaattggattctgcaag

SEQ ID NO: 37943 - DNA, 20 bp, Artificial Sequence
  chemically synthesized
caaacaattaacctgctctt

SEQ ID NO: 37944 - DNA, 20 bp, Artificial Sequence
  chemically synthesized
aacctgctcttcagttacat

SEQ ID NO: 37945 - DNA, 20 bp, Artificial Sequence
  chemically synthesized
cagttacattggaatgtgtt

SEQ ID NO: 37946 - DNA, 20 bp, Artificial Sequence
  chemically synthesized
agatttattttttcaaatgt

SEQ ID NO: 37947 - DNA, 20 bp, Artificial Sequence
  chemically synthesized
ttttttcaaatgttggaaca

SEQ ID NO: 37948 - DNA, 20 bp, Artificial Sequence
  chemically synthesized
atgttggaacaaagatgaaa

SEQ ID NO: 37949 - DNA, 20 bp, Artificial Sequence
  chemically synthesized
tggaacaaagatgaaaaagt

SEQ ID NO: 37950 - DNA, 20 bp, Artificial Sequence
  chemically synthesized
aacaaagatgaaaaagtgag

SEQ ID NO: 37951 - DNA, 20 bp, Artificial Sequence
  chemically synthesized
caaagatgaaaaagtgagaa

SEQ ID NO: 37952 - DNA, 20 bp, Artificial Sequence
  chemically synthesized
tgaaaaagtgagaagagccc

SEQ ID NO: 37953 - DNA, 20 bp, Artificial Sequence
  chemically synthesized
aagagccctagattttttct

SEQ ID NO: 37954 - DNA, 20 bp, Artificial Sequence
  chemically synthesized
tagattttttcttggaaatc

SEQ ID NO: 37955 - DNA, 20 bp, Artificial Sequence
  chemically synthesized
ttggaaatctggcttaaatc

SEQ ID NO: 37956 - DNA, 20 bp, Artificial Sequence
  chemically synthesized
tggaaatctggcttaaatcc

SEQ ID NO: 37957 - DNA, 20 bp, Artificial Sequence
  chemically synthesized
gtttctttatttccttgatt

SEQ ID NO: 37958 - DNA, 20 bp, Artificial Sequence
  chemically synthesized
tttctttatttccttgattt

SEQ ID NO: 37959 - DNA, 20 bp, Artificial Sequence
  chemically synthesized
atttccttgatttgggaatt

SEQ ID NO: 37960 - DNA, 20 bp, Artificial Sequence
  chemically synthesized
tgatttgggaatttggtcac

SEQ ID NO: 37961 - DNA, 20 bp, Artificial Sequence
  chemically synthesized
acaaataacatgattttcct

SEQ ID NO: 37962 - DNA, 20 bp, Artificial Sequence
  chemically synthesized
taacatgattttcctaagtc

SEQ ID NO: 37963 - DNA, 20 bp, Artificial Sequence
  chemically synthesized
agatttctttgtttataaaa

SEQ ID NO: 37964 - DNA, 20 bp, Artificial Sequence
  chemically synthesized
gatttctttgtttataaaat

SEQ ID NO: 37965 - DNA, 20 bp, Artificial Sequence
  chemically synthesized
atttctttgtttataaaatg

SEQ ID NO: 37966 - DNA, 20 bp, Artificial Sequence
  chemically synthesized
tgctaccctacctataccat

SEQ ID NO: 37967 - DNA, 20 bp, Artificial Sequence
  chemically synthesized
acctataccatgagctaaat

SEQ ID NO: 37968 - DNA, 20 bp, Artificial Sequence
  chemically synthesized
ataccatgagctaaataagc

SEQ ID NO: 37969 - DNA, 20 bp, Artificial Sequence
  chemically synthesized
taaataagctagtatttgta

SEQ ID NO: 37970 - DNA, 20 bp, Artificial Sequence
  chemically synthesized
aaataagctagtatttgtaa

SEQ ID NO: 37971 - DNA, 20 bp, Artificial Sequence
  chemically synthesized
cttacattcacaatcacaca

SEQ ID NO: 37972 - DNA, 20 bp, Artificial Sequence
  chemically synthesized
tgtatgtatgtataaaaatg

SEQ ID NO: 37973 - DNA, 20 bp, Artificial Sequence
  chemically synthesized
gtatgtatgtataaaaatgt

SEQ ID NO: 37974 - DNA, 20 bp, Artificial Sequence
  chemically synthesized
tatgtatgtataaaaatgtg

SEQ ID NO: 37975 - DNA, 20 bp, Artificial Sequence
  chemically synthesized
acccactcaacaaataccct

SEQ ID NO: 37976 - DNA, 20 bp, Artificial Sequence
  chemically synthesized
cattatatgcgtatatcatc

SEQ ID NO: 37977 - DNA, 20 bp, Artificial Sequence
  chemically synthesized
tgcgtatatcatctggcaaa

SEQ ID NO: 37978 - DNA, 20 bp, Artificial Sequence
  chemically synthesized
atggatgtgtataatttctc

SEQ ID NO: 37979 - DNA, 20 bp, Artificial Sequence
  chemically synthesized
tggatgtgtataatttctcc

SEQ ID NO: 37980 - DNA, 20 bp, Artificial Sequence
  chemically synthesized
ggatgtgtataatttctcca

SEQ ID NO: 37981 - DNA, 20 bp, Artificial Sequence
  chemically synthesized
tgtataatttctccagggat

SEQ ID NO: 37982 - DNA, 20 bp, Artificial Sequence
  chemically synthesized
ataatttctccagggataag

SEQ ID NO: 37983 - DNA, 20 bp, Artificial Sequence
  chemically synthesized
aagaagcaaatgtataccga

SEQ ID NO: 37984 - DNA, 20 bp, Artificial Sequence
  chemically synthesized
agcaaatgtataccgatgga

SEQ ID NO: 37985 - DNA, 20 bp, Artificial Sequence
  chemically synthesized
taccgatggaaagccttact

SEQ ID NO: 37986 - DNA, 20 bp, Artificial Sequence
  chemically synthesized
accgatggaaagccttactc

SEQ ID NO: 37987 - DNA, 20 bp, Artificial Sequence
  chemically synthesized
gccttactcaggccataaca

SEQ ID NO: 37988 - DNA, 20 bp, Artificial Sequence
  chemically synthesized
cttactcaggccataacaaa

SEQ ID NO: 37989 - DNA, 20 bp, Artificial Sequence
  chemically synthesized
tactcaggccataacaaaga

SEQ ID NO: 37990 - DNA, 20 bp, Artificial Sequence
  chemically synthesized
ataacaaagagagaaatgct

SEQ ID NO: 37991 - DNA, 20 bp, Artificial Sequence
  chemically synthesized
gctgagtcccactccatgaa

SEQ ID NO: 37992 - DNA, 20 bp, Artificial Sequence
  chemically synthesized
ctgagtcccactccatgaac

SEQ ID NO: 37993 - DNA, 20 bp, Artificial Sequence
  chemically synthesized
tcccactccatgaacaggtc

SEQ ID NO: 37994 - DNA, 20 bp, Artificial Sequence
  chemically synthesized
cccactccatgaacaggtca

SEQ ID NO: 37995 - DNA, 20 bp, Artificial Sequence
  chemically synthesized
caaggaaccaaacatattca

SEQ ID NO: 37996 - DNA, 20 bp, Artificial Sequence
  chemically synthesized
aggaaccaaacatattcaaa

SEQ ID NO: 37997 - DNA, 20 bp, Artificial Sequence
  chemically synthesized
atttcattgtttcaacttgc

SEQ ID NO: 37998 - DNA, 20 bp, Artificial Sequence
  chemically synthesized
cattgtttcaacttgctagt

SEQ ID NO: 37999 - DNA, 20 bp, Artificial Sequence
  chemically synthesized
attgtttcaacttgctagtg

SEQ ID NO: 38000 - DNA, 20 bp, Artificial Sequence
  chemically synthesized
ttgtttcaacttgctagtga

SEQ ID NO: 38001 - DNA, 20 bp, Artificial Sequence
  chemically synthesized
tgtttcaacttgctagtgag

SEQ ID NO: 38002 - DNA, 20 bp, Artificial Sequence
  chemically synthesized
tttcaacttgctagtgaggg

SEQ ID NO: 38003 - DNA, 20 bp, Artificial Sequence
  chemically synthesized
acttgctagtgaggggagca

SEQ ID NO: 38004 - DNA, 20 bp, Artificial Sequence
  chemically synthesized
aggggagcatggcacctgaa

SEQ ID NO: 38005 - DNA, 20 bp, Artificial Sequence
  chemically synthesized
gggagcatggcacctgaaca

SEQ ID NO: 38006 - DNA, 20 bp, Artificial Sequence
  chemically synthesized
tgatataaattaatgaaact

SEQ ID NO: 38007 - DNA, 20 bp, Artificial Sequence
  chemically synthesized
aattaatgaaactgagaacc

SEQ ID NO: 38008 - DNA, 20 bp, Artificial Sequence
  chemically synthesized
atgaaactgagaaccaagcg

SEQ ID NO: 38009 - DNA, 20 bp, Artificial Sequence
  chemically synthesized
gaaactgagaaccaagcgaa

SEQ ID NO: 38010 - DNA, 20 bp, Artificial Sequence
  chemically synthesized
tgagaaccaagcgaagagct

SEQ ID NO: 38011 - DNA, 20 bp, Artificial Sequence
  chemically synthesized
gagcttagccatcctttgca

SEQ ID NO: 38012 - DNA, 20 bp, Artificial Sequence
  chemically synthesized
ttagccatcctttgcatagt

SEQ ID NO: 38013 - DNA, 20 bp, Artificial Sequence
  chemically synthesized
ctttgcatagttagctacaa

SEQ ID NO: 38014 - DNA, 20 bp, Artificial Sequence
  chemically synthesized
tacaatggctatttattttt

SEQ ID NO: 38015 - DNA, 20 bp, Artificial Sequence
  chemically synthesized
atggctatttatttttcagc

SEQ ID NO: 38016 - DNA, 20 bp, Artificial Sequence
  chemically synthesized
tatttatttttcagccagac

SEQ ID NO: 38017 - DNA, 20 bp, Artificial Sequence
  chemically synthesized
cagccagactggccatcatg

SEQ ID NO: 38018 - DNA, 20 bp, Artificial Sequence
  chemically synthesized
agccagactggccatcatgt

SEQ ID NO: 38019 - DNA, 20 bp, Artificial Sequence
  chemically synthesized
atcatgtaggcacactcttt

SEQ ID NO: 38020 - DNA, 20 bp, Artificial Sequence
  chemically synthesized
gtaggcacactcttttagat

SEQ ID NO: 38021 - DNA, 20 bp, Artificial Sequence
  chemically synthesized
ttttttctgcccattcattc

SEQ ID NO: 38022 - DNA, 20 bp, Artificial Sequence
  chemically synthesized
cattcattccagcaccgtga

SEQ ID NO: 38023 - DNA, 20 bp, Artificial Sequence
  chemically synthesized
cagcaccgtgacagtcttca

SEQ ID NO: 38024 - DNA, 20 bp, Artificial Sequence
  chemically synthesized
agcaccgtgacagtcttcac

SEQ ID NO: 38025 - DNA, 20 bp, Artificial Sequence
  chemically synthesized
gcaccgtgacagtcttcacg

SEQ ID NO: 38026 - DNA, 20 bp, Artificial Sequence
  chemically synthesized
gaaattaaacttattttttt

SEQ ID NO: 38027 - DNA, 20 bp, Artificial Sequence
  chemically synthesized
agaatttttcaatcatatac

SEQ ID NO: 38028 - DNA, 20 bp, Artificial Sequence
  chemically synthesized
tcatatacaagattttgaac

SEQ ID NO: 38029 - DNA, 20 bp, Artificial Sequence
  chemically synthesized
catatacaagattttgaact

SEQ ID NO: 38030 - DNA, 20 bp, Artificial Sequence
  chemically synthesized
aattaaatgaattgcacata

SEQ ID NO: 38031 - DNA, 20 bp, Artificial Sequence
  chemically synthesized
atgaattgcacataaagcca

SEQ ID NO: 38032 - DNA, 20 bp, Artificial Sequence
  chemically synthesized
tatgtatttttactacattg

SEQ ID NO: 38033 - DNA, 20 bp, Artificial Sequence
  chemically synthesized
atgtatttttactacattgt

SEQ ID NO: 38034 - DNA, 20 bp, Artificial Sequence
  chemically synthesized
gtatttttactacattgtgg

SEQ ID NO: 38035 - DNA, 20 bp, Artificial Sequence
  chemically synthesized
aactatgtcttacctgattt

SEQ ID NO: 38036 - DNA, 20 bp, Artificial Sequence
  chemically synthesized
ttacctgatttcagaaataa

SEQ ID NO: 38037 - DNA, 20 bp, Artificial Sequence
  chemically synthesized
cctgatttcagaaataaaag

SEQ ID NO: 38038 - DNA, 20 bp, Artificial Sequence
  chemically synthesized
gatttcagaaataaaagaag

SEQ ID NO: 38039 - DNA, 20 bp, Artificial Sequence
  chemically synthesized
ttcagaaataaaagaagtag

SEQ ID NO: 38040 - DNA, 20 bp, Artificial Sequence
  chemically synthesized
cacttccttatgttccattt

SEQ ID NO: 38041 - DNA, 20 bp, Artificial Sequence
  chemically synthesized
acttccttatgttccatttt

SEQ ID NO: 38042 - DNA, 20 bp, Artificial Sequence
  chemically synthesized
cttatgttccattttgggac

SEQ ID NO: 38043 - DNA, 20 bp, Artificial Sequence
  chemically synthesized
tgttccattttgggactggc

SEQ ID NO: 38044 - DNA, 20 bp, Artificial Sequence
  chemically synthesized
tccattttgggactggccag

SEQ ID NO: 38045 - DNA, 20 bp, Artificial Sequence
  chemically synthesized
tgggactggccagcagtgcc

SEQ ID NO: 38046 - DNA, 20 bp, Artificial Sequence
  chemically synthesized
actggccagcagtgcccaga

SEQ ID NO: 38047 - DNA, 20 bp, Artificial Sequence
  chemically synthesized
cagaaagtgtgtcccaatcc

SEQ ID NO: 38048 - DNA, 20 bp, Artificial Sequence
  chemically synthesized
agaaagtgtgtcccaatccc

SEQ ID NO: 38049 - DNA, 20 bp, Artificial Sequence
  chemically synthesized
aggacattgttgacttacat

SEQ ID NO: 38050 - DNA, 20 bp, Artificial Sequence
  chemically synthesized
gacattgttgacttacatga

SEQ ID NO: 38051 - DNA, 20 bp, Artificial Sequence
  chemically synthesized
gagtaaacgcacccacaaac

SEQ ID NO: 38052 - DNA, 20 bp, Artificial Sequence
  chemically synthesized
aaacgcacccacaaaccaga

SEQ ID NO: 38053 - DNA, 20 bp, Artificial Sequence
  chemically synthesized
acaaaccagatagtcaaatt

SEQ ID NO: 38054 - DNA, 20 bp, Artificial Sequence
  chemically synthesized
aattaagttaatgattctct

SEQ ID NO: 38055 - DNA, 20 bp, Artificial Sequence
  chemically synthesized
ttaagttaatgattctctca

SEQ ID NO: 38056 - DNA, 20 bp, Artificial Sequence
  chemically synthesized
ctctcagagacccatgccac

SEQ ID NO: 38057 - DNA, 20 bp, Artificial Sequence
  chemically synthesized
agagacccatgccactggct

SEQ ID NO: 38058 - DNA, 20 bp, Artificial Sequence
  chemically synthesized
gacccatgccactggctcag

SEQ ID NO: 38059 - DNA, 20 bp, Artificial Sequence
  chemically synthesized
acccatgccactggctcagc

SEQ ID NO: 38060 - DNA, 20 bp, Artificial Sequence
  chemically synthesized
cccatgccactggctcagca

SEQ ID NO: 38061 - DNA, 20 bp, Artificial Sequence
  chemically synthesized
ttcaaacattaccttgaata

SEQ ID NO: 38062 - DNA, 20 bp, Artificial Sequence
  chemically synthesized
caaacattaccttgaatata

SEQ ID NO: 38063 - DNA, 20 bp, Artificial Sequence
  chemically synthesized
tagagtcttataaaatattt

SEQ ID NO: 38064 - DNA, 20 bp, Artificial Sequence
  chemically synthesized
gagtcttataaaatatttga

SEQ ID NO: 38065 - DNA, 20 bp, Artificial Sequence
  chemically synthesized
atttgagagtgcaatgtcaa

SEQ ID NO: 38066 - DNA, 20 bp, Artificial Sequence
  chemically synthesized
agtgcaatgtcaatagatgc

SEQ ID NO: 38067 - DNA, 20 bp, Artificial Sequence
  chemically synthesized
gtgcaatgtcaatagatgct

SEQ ID NO: 38068 - DNA, 20 bp, Artificial Sequence
  chemically synthesized
caatgtcaatagatgctggg

SEQ ID NO: 38069 - DNA, 20 bp, Artificial Sequence
  chemically synthesized
tgtcaatagatgctgggaag

SEQ ID NO: 38070 - DNA, 20 bp, Artificial Sequence
  chemically synthesized
tagatgctgggaagtggtga

SEQ ID NO: 38071 - DNA, 20 bp, Artificial Sequence
  chemically synthesized
gtgaaagccatttcccccct

SEQ ID NO: 38072 - DNA, 20 bp, Artificial Sequence
  chemically synthesized
cttactccttccctcacccc

SEQ ID NO: 38073 - DNA, 20 bp, Artificial Sequence
  chemically synthesized
agaccttcatctttcctgat

SEQ ID NO: 38074 - DNA, 20 bp, Artificial Sequence
  chemically synthesized
ttctttcattctctttcttt

SEQ ID NO: 38075 - DNA, 20 bp, Artificial Sequence
  chemically synthesized
tggataaaataaaatcataa

SEQ ID NO: 38076 - DNA, 20 bp, Artificial Sequence
  chemically synthesized
ataaaataaaatcataaaag

SEQ ID NO: 38077 - DNA, 20 bp, Artificial Sequence
  chemically synthesized
taaaagtagctcatatttgc

SEQ ID NO: 38078 - DNA, 20 bp, Artificial Sequence
  chemically synthesized
ttgctggtaacttccatgac

SEQ ID NO: 38079 - DNA, 20 bp, Artificial Sequence
  chemically synthesized
ccatgaccagaccctctgcc

SEQ ID NO: 38080 - DNA, 20 bp, Artificial Sequence
  chemically synthesized
tgccaagtgctgcacatcca

SEQ ID NO: 38081 - DNA, 20 bp, Artificial Sequence
  chemically synthesized
gcacatccatagcctccctc

SEQ ID NO: 38082 - DNA, 20 bp, Artificial Sequence
  chemically synthesized
gcctccctcaagctttccaa

SEQ ID NO: 38083 - DNA, 20 bp, Artificial Sequence
  chemically synthesized
cctccctcaagctttccaac

SEQ ID NO: 38084 - DNA, 20 bp, Artificial Sequence
  chemically synthesized
ccctcaagctttccaacagg

SEQ ID NO: 38085 - DNA, 20 bp, Artificial Sequence
  chemically synthesized
tccaacaggcagtgctgtac

SEQ ID NO: 38086 - DNA, 20 bp, Artificial Sequence
  chemically synthesized
ccaacaggcagtgctgtacg

SEQ ID NO: 38087 - DNA, 20 bp, Artificial Sequence
  chemically synthesized
aacaggcagtgctgtacgag

SEQ ID NO: 38088 - DNA, 20 bp, Artificial Sequence
  chemically synthesized
acaggcagtgctgtacgagg

SEQ ID NO: 38089 - DNA, 20 bp, Artificial Sequence
  chemically synthesized
caggcagtgctgtacgagga

SEQ ID NO: 38090 - DNA, 20 bp, Artificial Sequence
  chemically synthesized
aggcagtgctgtacgaggag

SEQ ID NO: 38091 - DNA, 20 bp, Artificial Sequence
  chemically synthesized
ggcagtgctgtacgaggagg

SEQ ID NO: 38092 - DNA, 20 bp, Artificial Sequence
  chemically synthesized
tgctgtacgaggagggggct

SEQ ID NO: 38093 - DNA, 20 bp, Artificial Sequence
  chemically synthesized
gctgtacgaggagggggctg

SEQ ID NO: 38094 - DNA, 20 bp, Artificial Sequence
  chemically synthesized
gagggggctgaggccttccc

SEQ ID NO: 38095 - DNA, 20 bp, Artificial Sequence
  chemically synthesized
agggggctgaggccttcccg

SEQ ID NO: 38096 - DNA, 20 bp, Artificial Sequence
  chemically synthesized
cccgaggttgtgtcgctacc

SEQ ID NO: 38097 - DNA, 20 bp, Artificial Sequence
  chemically synthesized
ccgaggttgtgtcgctaccc

SEQ ID NO: 38098 - DNA, 20 bp, Artificial Sequence
  chemically synthesized
cgaggttgtgtcgctaccca

SEQ ID NO: 38099 - DNA, 20 bp, Artificial Sequence
  chemically synthesized
gaggttgtgtcgctacccag

SEQ ID NO: 38100 - DNA, 20 bp, Artificial Sequence
  chemically synthesized
tgtgtcgctacccaggggtg

SEQ ID NO: 38101 - DNA, 20 bp, Artificial Sequence
  chemically synthesized
ctacccaggggtgcagctga

SEQ ID NO: 38102 - DNA, 20 bp, Artificial Sequence
  chemically synthesized
gctgatagacacaacccttt

SEQ ID NO: 38103 - DNA, 20 bp, Artificial Sequence
  chemically synthesized
ctgatagacacaaccctttc

SEQ ID NO: 38104 - DNA, 20 bp, Artificial Sequence
  chemically synthesized
gacacaaccctttcaggtct

SEQ ID NO: 38105 - DNA, 20 bp, Artificial Sequence
  chemically synthesized
cctttcaggtcttagtttac

SEQ ID NO: 38106 - DNA, 20 bp, Artificial Sequence
  chemically synthesized
tcaggtcttagtttacgagc

SEQ ID NO: 38107 - DNA, 20 bp, Artificial Sequence
  chemically synthesized
gtcttagtttacgagcaagc

SEQ ID NO: 38108 - DNA, 20 bp, Artificial Sequence
  chemically synthesized
tcttagtttacgagcaagct

SEQ ID NO: 38109 - DNA, 20 bp, Artificial Sequence
  chemically synthesized
ctgtgccgaaatgacaacat

SEQ ID NO: 38110 - DNA, 20 bp, Artificial Sequence
  chemically synthesized
cttcaaaatttatttattcc

SEQ ID NO: 38111 - DNA, 20 bp, Artificial Sequence
  chemically synthesized
gtaattataaattatgttat

SEQ ID NO: 38112 - DNA, 20 bp, Artificial Sequence
  chemically synthesized
ttataagatatcaatccttc

SEQ ID NO: 38113 - DNA, 20 bp, Artificial Sequence
  chemically synthesized
tataagatatcaatccttcc

SEQ ID NO: 38114 - DNA, 20 bp, Artificial Sequence
  chemically synthesized
taagatatcaatccttccag

SEQ ID NO: 38115 - DNA, 20 bp, Artificial Sequence
  chemically synthesized
aagatatcaatccttccagg

SEQ ID NO: 38116 - DNA, 20 bp, Artificial Sequence
  chemically synthesized
agatatcaatccttccagga

SEQ ID NO: 38117 - DNA, 20 bp, Artificial Sequence
  chemically synthesized
gatatcaatccttccaggag

SEQ ID NO: 38118 - DNA, 20 bp, Artificial Sequence
  chemically synthesized
atatcaatccttccaggagg

SEQ ID NO: 38119 - DNA, 20 bp, Artificial Sequence
  chemically synthesized
tcaatccttccaggaggggg

SEQ ID NO: 38120 - DNA, 20 bp, Artificial Sequence
  chemically synthesized
atccttccaggagggggtgg

SEQ ID NO: 38121 - DNA, 20 bp, Artificial Sequence
  chemically synthesized
gtggctcatgcctataatcc

SEQ ID NO: 38122 - DNA, 20 bp, Artificial Sequence
  chemically synthesized
tgcctataatcccagcattt

SEQ ID NO: 38123 - DNA, 20 bp, Artificial Sequence
  chemically synthesized
gcctataatcccagcatttt

SEQ ID NO: 38124 - DNA, 20 bp, Artificial Sequence
  chemically synthesized
ctataatcccagcattttgg

SEQ ID NO: 38125 - DNA, 20 bp, Artificial Sequence
  chemically synthesized
tataatcccagcattttggg

SEQ ID NO: 38126 - DNA, 20 bp, Artificial Sequence
  chemically synthesized
cccagcattttgggaggcca

SEQ ID NO: 38127 - DNA, 20 bp, Artificial Sequence
  chemically synthesized
agcattttgggaggccacgg

SEQ ID NO: 38128 - DNA, 20 bp, Artificial Sequence
  chemically synthesized
ttttgggaggccacggcaga

SEQ ID NO: 38129 - DNA, 20 bp, Artificial Sequence
  chemically synthesized
ccacggcagatggatcacct

SEQ ID NO: 38130 - DNA, 20 bp, Artificial Sequence
  chemically synthesized
cacggcagatggatcacctg

SEQ ID NO: 38131 - DNA, 20 bp, Artificial Sequence
  chemically synthesized
gcagatggatcacctgaggc

SEQ ID NO: 38132 - DNA, 20 bp, Artificial Sequence
  chemically synthesized
cagatggatcacctgaggcc

SEQ ID NO: 38133 - DNA, 20 bp, Artificial Sequence
  chemically synthesized
gatggatcacctgaggccag

SEQ ID NO: 38134 - DNA, 20 bp, Artificial Sequence
  chemically synthesized
tcacctgaggccaggagttt

SEQ ID NO: 38135 - DNA, 20 bp, Artificial Sequence
  chemically synthesized
tgaggccaggagtttgagac

SEQ ID NO: 38136 - DNA, 20 bp, Artificial Sequence
  chemically synthesized
ccaggagtttgagacaagcc

SEQ ID NO: 38137 - DNA, 20 bp, Artificial Sequence
  chemically synthesized
caggagtttgagacaagcct

SEQ ID NO: 38138 - DNA, 20 bp, Artificial Sequence
  chemically synthesized
tctacaaaaaatacaaaaat

SEQ ID NO: 38139 - DNA, 20 bp, Artificial Sequence
  chemically synthesized
caaaaaatacaaaaattagc

SEQ ID NO: 38140 - DNA, 20 bp, Artificial Sequence
  chemically synthesized
aaaaaatacaaaaattagct

SEQ ID NO: 38141 - DNA, 20 bp, Artificial Sequence
  chemically synthesized
atacaaaaattagctgggtg

SEQ ID NO: 38142 - DNA, 20 bp, Artificial Sequence
  chemically synthesized
acaaaaattagctgggtgtg

SEQ ID NO: 38143 - DNA, 20 bp, Artificial Sequence
  chemically synthesized
caaaaattagctgggtgtgg

SEQ ID NO: 38144 - DNA, 20 bp, Artificial Sequence
  chemically synthesized
ctgggtgtggaggcacatgc

SEQ ID NO: 38145 - DNA, 20 bp, Artificial Sequence
  chemically synthesized
gaggcacatgccagtcatcc

SEQ ID NO: 38146 - DNA, 20 bp, Artificial Sequence
  chemically synthesized
tgccagtcatcccagctact

SEQ ID NO: 38147 - DNA, 20 bp, Artificial Sequence
  chemically synthesized
cagtcatcccagctactaag

SEQ ID NO: 38148 - DNA, 20 bp, Artificial Sequence
  chemically synthesized
agtcatcccagctactaagt

SEQ ID NO: 38149 - DNA, 20 bp, Artificial Sequence
  chemically synthesized
tcccagctactaagtaggct

SEQ ID NO: 38150 - DNA, 20 bp, Artificial Sequence
  chemically synthesized
cccagctactaagtaggctg

SEQ ID NO: 38151 - DNA, 20 bp, Artificial Sequence
  chemically synthesized
tactaagtaggctgaggcac

SEQ ID NO: 38152 - DNA, 20 bp, Artificial Sequence
  chemically synthesized
gcactagaattgcttgaaca

SEQ ID NO: 38153 - DNA, 20 bp, Artificial Sequence
  chemically synthesized
cactagaattgcttgaacac

SEQ ID NO: 38154 - DNA, 20 bp, Artificial Sequence
  chemically synthesized
ctagaattgcttgaacacag

SEQ ID NO: 38155 - DNA, 20 bp, Artificial Sequence
  chemically synthesized
aattgcttgaacacaggaga

SEQ ID NO: 38156 - DNA, 20 bp, Artificial Sequence
  chemically synthesized
ttgcttgaacacaggagatg

SEQ ID NO: 38157 - DNA, 20 bp, Artificial Sequence
  chemically synthesized
tgcttgaacacaggagatgg

SEQ ID NO: 38158 - DNA, 20 bp, Artificial Sequence
  chemically synthesized
aacacaggagatggaggttg

SEQ ID NO: 38159 - DNA, 20 bp, Artificial Sequence
  chemically synthesized
caggagatggaggttgcagt

SEQ ID NO: 38160 - DNA, 20 bp, Artificial Sequence
  chemically synthesized
gatggaggttgcagtgagcc

SEQ ID NO: 38161 - DNA, 20 bp, Artificial Sequence
  chemically synthesized
aagaatgtgccactgcactc

SEQ ID NO: 38162 - DNA, 20 bp, Artificial Sequence
  chemically synthesized
tgtgccactgcactccagcc

SEQ ID NO: 38163 - DNA, 20 bp, Artificial Sequence
  chemically synthesized
gtgccactgcactccagcct

SEQ ID NO: 38164 - DNA, 20 bp, Artificial Sequence
  chemically synthesized
ctgcactccagcctgggtga

SEQ ID NO: 38165 - DNA, 20 bp, Artificial Sequence
  chemically synthesized
gcactccagcctgggtgaca

SEQ ID NO: 38166 - DNA, 20 bp, Artificial Sequence
  chemically synthesized
tccagcctgggtgacagagc

SEQ ID NO: 38167 - DNA, 20 bp, Artificial Sequence
  chemically synthesized
gtgacagagcaagaatgtct

SEQ ID NO: 38168 - DNA, 20 bp, Artificial Sequence
  chemically synthesized
tgacagagcaagaatgtctc

SEQ ID NO: 38169 - DNA, 20 bp, Artificial Sequence
  chemically synthesized
agagcaagaatgtctcagga

SEQ ID NO: 38170 - DNA, 20 bp, Artificial Sequence
  chemically synthesized
aatatcaatccttcctattc

SEQ ID NO: 38171 - DNA, 20 bp, Artificial Sequence
  chemically synthesized
atcaatccttcctattctag

SEQ ID NO: 38172 - DNA, 20 bp, Artificial Sequence
  chemically synthesized
ccttcctattctagtagttg

SEQ ID NO: 38173 - DNA, 20 bp, Artificial Sequence
  chemically synthesized
atatttttaaaaataaaaca

SEQ ID NO: 38174 - DNA, 20 bp, Artificial Sequence
  chemically synthesized
tatttttaaaaataaaacat

SEQ ID NO: 38175 - DNA, 20 bp, Artificial Sequence
  chemically synthesized
atttttaaaaataaaacata

SEQ ID NO: 38176 - DNA, 20 bp, Artificial Sequence
  chemically synthesized
taaaaataaaacatagggtc

SEQ ID NO: 38177 - DNA, 20 bp, Artificial Sequence
  chemically synthesized
ataaaacatagggtcgagtg

SEQ ID NO: 38178 - DNA, 20 bp, Artificial Sequence
  chemically synthesized
aaacatagggtcgagtgcgg

SEQ ID NO: 38179 - DNA, 20 bp, Artificial Sequence
  chemically synthesized
gtggctcaactctgtaatcc

SEQ ID NO: 38180 - DNA, 20 bp, Artificial Sequence
  chemically synthesized
actctgtaatcccagcactt

SEQ ID NO: 38181 - DNA, 20 bp, Artificial Sequence
  chemically synthesized
ctctgtaatcccagcacttt

SEQ ID NO: 38182 - DNA, 20 bp, Artificial Sequence
  chemically synthesized
ctgtaatcccagcactttgg

SEQ ID NO: 38183 - DNA, 20 bp, Artificial Sequence
  chemically synthesized
tgtaatcccagcactttggg

SEQ ID NO: 38184 - DNA, 20 bp, Artificial Sequence
  chemically synthesized
tcccagcactttgggaggcc

SEQ ID NO: 38185 - DNA, 20 bp, Artificial Sequence
  chemically synthesized
agcactttgggaggccaaga

SEQ ID NO: 38186 - DNA, 20 bp, Artificial Sequence
  chemically synthesized
gcactttgggaggccaagac

SEQ ID NO: 38187 - DNA, 20 bp, Artificial Sequence
  chemically synthesized
ctttgggaggccaagacagg

SEQ ID NO: 38188 - DNA, 20 bp, Artificial Sequence
  chemically synthesized
ggccaagacaggtggatcac

SEQ ID NO: 38189 - DNA, 20 bp, Artificial Sequence
  chemically synthesized
gccaagacaggtggatcaca

SEQ ID NO: 38190 - DNA, 20 bp, Artificial Sequence
  chemically synthesized
agacaggtggatcacaaggt

SEQ ID NO: 38191 - DNA, 20 bp, Artificial Sequence
  chemically synthesized
gacaggtggatcacaaggtc

SEQ ID NO: 38192 - DNA, 20 bp, Artificial Sequence
  chemically synthesized
caggtggatcacaaggtcag

SEQ ID NO: 38193 - DNA, 20 bp, Artificial Sequence
  chemically synthesized
gatcacaaggtcaggagttt

SEQ ID NO: 38194 - DNA, 20 bp, Artificial Sequence
  chemically synthesized
caaggtcaggagtttgagac

SEQ ID NO: 38195 - DNA, 20 bp, Artificial Sequence
  chemically synthesized
gtcaggagtttgagaccagc

SEQ ID NO: 38196 - DNA, 20 bp, Artificial Sequence
  chemically synthesized
tcaggagtttgagaccagcc

SEQ ID NO: 38197 - DNA, 20 bp, Artificial Sequence
  chemically synthesized
tgagaccagccaggccaatg

SEQ ID NO: 38198 - DNA, 20 bp, Artificial Sequence
  chemically synthesized
tctactaaaaatacaaaaat

SEQ ID NO: 38199 - DNA, 20 bp, Artificial Sequence
  chemically synthesized
ctaaaaatacaaaaattagc

SEQ ID NO: 38200 - DNA, 20 bp, Artificial Sequence
  chemically synthesized
taaaaatacaaaaattagcc

SEQ ID NO: 38201 - DNA, 20 bp, Artificial Sequence
  chemically synthesized
atacaaaaattagccaggcg

SEQ ID NO: 38202 - DNA, 20 bp, Artificial Sequence
  chemically synthesized
caaaaattagccaggcgtgg

SEQ ID NO: 38203 - DNA, 20 bp, Artificial Sequence
  chemically synthesized
aaattagccaggcgtggtgg

SEQ ID NO: 38204 - DNA, 20 bp, Artificial Sequence
  chemically synthesized
aattagccaggcgtggtggt

SEQ ID NO: 38205 - DNA, 20 bp, Artificial Sequence
  chemically synthesized
gtggtgggcacctgtaatcc

SEQ ID NO: 38206 - DNA, 20 bp, Artificial Sequence
  chemically synthesized
gcacctgtaatcccagctac

SEQ ID NO: 38207 - DNA, 20 bp, Artificial Sequence
  chemically synthesized
cacctgtaatcccagctact

SEQ ID NO: 38208 - DNA, 20 bp, Artificial Sequence
  chemically synthesized
acctgtaatcccagctacta

SEQ ID NO: 38209 - DNA, 20 bp, Artificial Sequence
  chemically synthesized
ctgtaatcccagctactagg

SEQ ID NO: 38210 - DNA, 20 bp, Artificial Sequence
  chemically synthesized
tgtaatcccagctactaggg

SEQ ID NO: 38211 - DNA, 20 bp, Artificial Sequence
  chemically synthesized
atcccagctactagggaggc

SEQ ID NO: 38212 - DNA, 20 bp, Artificial Sequence
  chemically synthesized
cccagctactagggaggctg

SEQ ID NO: 38213 - DNA, 20 bp, Artificial Sequence
  chemically synthesized
ctggagtattcacttgaacc

SEQ ID NO: 38214 - DNA, 20 bp, Artificial Sequence
  chemically synthesized
tggagtattcacttgaaccc

SEQ ID NO: 38215 - DNA, 20 bp, Artificial Sequence
  chemically synthesized
gagtattcacttgaacccag

SEQ ID NO: 38216 - DNA, 20 bp, Artificial Sequence
  chemically synthesized
agtattcacttgaacccagg

SEQ ID NO: 38217 - DNA, 20 bp, Artificial Sequence
  chemically synthesized
attcacttgaacccaggagg

SEQ ID NO: 38218 - DNA, 20 bp, Artificial Sequence
  chemically synthesized
cacttgaacccaggaggtgg

SEQ ID NO: 38219 - DNA, 20 bp, Artificial Sequence
  chemically synthesized
aacccaggaggtggaagttg

SEQ ID NO: 38220 - DNA, 20 bp, Artificial Sequence
  chemically synthesized
caggaggtggaagttgcagt

SEQ ID NO: 38221 - DNA, 20 bp, Artificial Sequence
  chemically synthesized
gcagtgagccaaaatcacgt

SEQ ID NO: 38222 - DNA, 20 bp, Artificial Sequence
  chemically synthesized
tcacgtcagtgcacttcaac

SEQ ID NO: 38223 - DNA, 20 bp, Artificial Sequence
  chemically synthesized
cacgtcagtgcacttcaacc

SEQ ID NO: 38224 - DNA, 20 bp, Artificial Sequence
  chemically synthesized
acgtcagtgcacttcaaccg

SEQ ID NO: 38225 - DNA, 20 bp, Artificial Sequence
  chemically synthesized
cagtgcacttcaaccggggt

SEQ ID NO: 38226 - DNA, 20 bp, Artificial Sequence
  chemically synthesized
gtgcacttcaaccggggtga

SEQ ID NO: 38227 - DNA, 20 bp, Artificial Sequence
  chemically synthesized
aataaaataaaataaaataa

SEQ ID NO: 38228 - DNA, 20 bp, Artificial Sequence
  chemically synthesized
aataaaataaaataaaagca

SEQ ID NO: 38229 - DNA, 20 bp, Artificial Sequence
  chemically synthesized
tctttccgcaaatgaattca

SEQ ID NO: 38230 - DNA, 20 bp, Artificial Sequence
  chemically synthesized
cttacattttcgttctcatg

SEQ ID NO: 38231 - DNA, 20 bp, Artificial Sequence
  chemically synthesized
attttcgttctcatgaagta

SEQ ID NO: 38232 - DNA, 20 bp, Artificial Sequence
  chemically synthesized
tcgttctcatgaagtaaagc

SEQ ID NO: 38233 - DNA, 20 bp, Artificial Sequence
  chemically synthesized
gttctcatgaagtaaagcaa

SEQ ID NO: 38234 - DNA, 20 bp, Artificial Sequence
  chemically synthesized
ctcatgaagtaaagcaagag

SEQ ID NO: 38235 - DNA, 20 bp, Artificial Sequence
  chemically synthesized
atgaagtaaagcaagagtgg

SEQ ID NO: 38236 - DNA, 20 bp, Artificial Sequence
  chemically synthesized
aaagcaagagtggtagaatt

SEQ ID NO: 38237 - DNA, 20 bp, Artificial Sequence
  chemically synthesized
gcaagagtggtagaattaag

SEQ ID NO: 38238 - DNA, 20 bp, Artificial Sequence
  chemically synthesized
gagtggtagaattaagtgga

SEQ ID NO: 38239 - DNA, 20 bp, Artificial Sequence
  chemically synthesized
gtggtagaattaagtggaaa

SEQ ID NO: 38240 - DNA, 20 bp, Artificial Sequence
  chemically synthesized
aagtggaaagagtctatctc

SEQ ID NO: 38241 - DNA, 20 bp, Artificial Sequence
  chemically synthesized
gaaagagtctatctctagtg

SEQ ID NO: 38242 - DNA, 20 bp, Artificial Sequence
  chemically synthesized
tatctctagtgtagtcacgt

SEQ ID NO: 38243 - DNA, 20 bp, Artificial Sequence
  chemically synthesized
ctctagtgtagtcacgtcag

SEQ ID NO: 38244 - DNA, 20 bp, Artificial Sequence
  chemically synthesized
gtcacgtcagtggttgtgtc

SEQ ID NO: 38245 - DNA, 20 bp, Artificial Sequence
  chemically synthesized
cgtcagtggttgtgtcaaga

SEQ ID NO: 38246 - DNA, 20 bp, Artificial Sequence
  chemically synthesized
agtggttgtgtcaagatggt

SEQ ID NO: 38247 - DNA, 20 bp, Artificial Sequence
  chemically synthesized
gtggttgtgtcaagatggtt

SEQ ID NO: 38248 - DNA, 20 bp, Artificial Sequence
  chemically synthesized
ggttgtgtcaagatggttag

SEQ ID NO: 38249 - DNA, 20 bp, Artificial Sequence
  chemically synthesized
gttgtgtcaagatggttagg

SEQ ID NO: 38250 - DNA, 20 bp, Artificial Sequence
  chemically synthesized
gaggctcctcccgtttaaaa

SEQ ID NO: 38251 - DNA, 20 bp, Artificial Sequence
  chemically synthesized
tcccgtttaaaacagtatcc

SEQ ID NO: 38252 - DNA, 20 bp, Artificial Sequence
  chemically synthesized
ttaaaacagtatccaagccc

SEQ ID NO: 38253 - DNA, 20 bp, Artificial Sequence
  chemically synthesized
agccccagttgtaaatcaat

SEQ ID NO: 38254 - DNA, 20 bp, Artificial Sequence
  chemically synthesized
gccccagttgtaaatcaatt

SEQ ID NO: 38255 - DNA, 20 bp, Artificial Sequence
  chemically synthesized
ccccagttgtaaatcaattg

SEQ ID NO: 38256 - DNA, 20 bp, Artificial Sequence
  chemically synthesized
ccagttgtaaatcaattggg

SEQ ID NO: 38257 - DNA, 20 bp, Artificial Sequence
  chemically synthesized
gacacgccaactctgatcat

SEQ ID NO: 38258 - DNA, 20 bp, Artificial Sequence
  chemically synthesized
tctgatcatcagcaatatct

SEQ ID NO: 38259 - DNA, 20 bp, Artificial Sequence
  chemically synthesized
catcagcaatatctgagctc

SEQ ID NO: 38260 - DNA, 20 bp, Artificial Sequence
  chemically synthesized
caatatctgagctccagtct

SEQ ID NO: 38261 - DNA, 20 bp, Artificial Sequence
  chemically synthesized
ccagtctcagatattgtgtg

SEQ ID NO: 38262 - DNA, 20 bp, Artificial Sequence
  chemically synthesized
tctcagatattgtgtgcagt

SEQ ID NO: 38263 - DNA, 20 bp, Artificial Sequence
  chemically synthesized
ccctctacctccttccctac

SEQ ID NO: 38264 - DNA, 20 bp, Artificial Sequence
  chemically synthesized
taccagaaaaatcaccactt

SEQ ID NO: 38265 - DNA, 20 bp, Artificial Sequence
  chemically synthesized
aaaatcaccactttagtccc

SEQ ID NO: 38266 - DNA, 20 bp, Artificial Sequence
  chemically synthesized
ccactttagtccctggccac

SEQ ID NO: 38267 - DNA, 20 bp, Artificial Sequence
  chemically synthesized
cactttagtccctggccacc

SEQ ID NO: 38268 - DNA, 20 bp, Artificial Sequence
  chemically synthesized
ccctggccaccgggacaccc

SEQ ID NO: 38269 - DNA, 20 bp, Artificial Sequence
  chemically synthesized
cctggccaccgggacacccc

SEQ ID NO: 38270 - DNA, 20 bp, Artificial Sequence
  chemically synthesized
tggccaccgggacaccccag

SEQ ID NO: 38271 - DNA, 20 bp, Artificial Sequence
  chemically synthesized
ggccaccgggacaccccagg

SEQ ID NO: 38272 - DNA, 20 bp, Artificial Sequence
  chemically synthesized
gccaccgggacaccccagga

SEQ ID NO: 38273 - DNA, 20 bp, Artificial Sequence
  chemically synthesized
ccgggacaccccaggagggt

SEQ ID NO: 38274 - DNA, 20 bp, Artificial Sequence
  chemically synthesized
ggacaccccaggagggtgag

SEQ ID NO: 38275 - DNA, 20 bp, Artificial Sequence
  chemically synthesized
cccaggagggtgagtggtct

SEQ ID NO: 38276 - DNA, 20 bp, Artificial Sequence
  chemically synthesized
ccaggagggtgagtggtctg

SEQ ID NO: 38277 - DNA, 20 bp, Artificial Sequence
  chemically synthesized
ggagggtgagtggtctgagg

SEQ ID NO: 38278 - DNA, 20 bp, Artificial Sequence
  chemically synthesized
tgagtggtctgaggtagtta

SEQ ID NO: 38279 - DNA, 20 bp, Artificial Sequence
  chemically synthesized
tgaggtagttatggcactta

SEQ ID NO: 38280 - DNA, 20 bp, Artificial Sequence
  chemically synthesized
tggctcccttgctgctgatc

SEQ ID NO: 38281 - DNA, 20 bp, Artificial Sequence
  chemically synthesized
ttgctgctgatctggaactc

SEQ ID NO: 38282 - DNA, 20 bp, Artificial Sequence
  chemically synthesized
tgatctggaactcaagcccc

SEQ ID NO: 38283 - DNA, 20 bp, Artificial Sequence
  chemically synthesized
tctggaactcaagccccaag

SEQ ID NO: 38284 - DNA, 20 bp, Artificial Sequence
  chemically synthesized
caagccccaagaagtcccct

SEQ ID NO: 38285 - DNA, 20 bp, Artificial Sequence
  chemically synthesized
ggatgatctgaatatacatt

SEQ ID NO: 38286 - DNA, 20 bp, Artificial Sequence
  chemically synthesized
gatgatctgaatatacattt

SEQ ID NO: 38287 - DNA, 20 bp, Artificial Sequence
  chemically synthesized
atctgaatatacatttggga

SEQ ID NO: 38288 - DNA, 20 bp, Artificial Sequence
  chemically synthesized
atatacatttgggacagatc

SEQ ID NO: 38289 - DNA, 20 bp, Artificial Sequence
  chemically synthesized
tatacatttgggacagatct

SEQ ID NO: 38290 - DNA, 20 bp, Artificial Sequence
  chemically synthesized
atacatttgggacagatcta

SEQ ID NO: 38291 - DNA, 20 bp, Artificial Sequence
  chemically synthesized
acatttgggacagatctagg

SEQ ID NO: 38292 - DNA, 20 bp, Artificial Sequence
  chemically synthesized
gacagatctagggagtttct

SEQ ID NO: 38293 - DNA, 20 bp, Artificial Sequence
  chemically synthesized
gggagtttctgagcaacact

SEQ ID NO: 38294 - DNA, 20 bp, Artificial Sequence
  chemically synthesized
tttctgagcaacacttagac

SEQ ID NO: 38295 - DNA, 20 bp, Artificial Sequence
  chemically synthesized
ttctgagcaacacttagact

SEQ ID NO: 38296 - DNA, 20 bp, Artificial Sequence
  chemically synthesized
tctgagcaacacttagactg

SEQ ID NO: 38297 - DNA, 20 bp, Artificial Sequence
  chemically synthesized
cctacttgaattcgctactt

SEQ ID NO: 38298 - DNA, 20 bp, Artificial Sequence
  chemically synthesized
ctacttgaattcgctacttt

SEQ ID NO: 38299 - DNA, 20 bp, Artificial Sequence
  chemically synthesized
aattcgctactttgggactc

SEQ ID NO: 38300 - DNA, 20 bp, Artificial Sequence
  chemically synthesized
ctactttgggactcaagtct

SEQ ID NO: 38301 - DNA, 20 bp, Artificial Sequence
  chemically synthesized
tactttgggactcaagtcta

SEQ ID NO: 38302 - DNA, 20 bp, Artificial Sequence
  chemically synthesized
actttgggactcaagtctaa

SEQ ID NO: 38303 - DNA, 20 bp, Artificial Sequence
  chemically synthesized
ggactcaagtctaagggact

SEQ ID NO: 38304 - DNA, 20 bp, Artificial Sequence
  chemically synthesized
aagtctaagggactgagact

SEQ ID NO: 38305 - DNA, 20 bp, Artificial Sequence
  chemically synthesized
ctaagggactgagactgaga

SEQ ID NO: 38306 - DNA, 20 bp, Artificial Sequence
  chemically synthesized
taagggactgagactgagac

SEQ ID NO: 38307 - DNA, 20 bp, Artificial Sequence
  chemically synthesized
agggactgagactgagacag

SEQ ID NO: 38308 - DNA, 20 bp, Artificial Sequence
  chemically synthesized
ggactgagactgagacagga

SEQ ID NO: 38309 - DNA, 20 bp, Artificial Sequence
  chemically synthesized
agactgagacaggagagcac

SEQ ID NO: 38310 - DNA, 20 bp, Artificial Sequence
  chemically synthesized
ggagagcacaagactaactt

SEQ ID NO: 38311 - DNA, 20 bp, Artificial Sequence
  chemically synthesized
cttgcaactgtcaatgcctc

SEQ ID NO: 38312 - DNA, 20 bp, Artificial Sequence
  chemically synthesized
aatgcctccagccaaatgcc

SEQ ID NO: 38313 - DNA, 20 bp, Artificial Sequence
  chemically synthesized
ctccagccaaatgcccagca

SEQ ID NO: 38314 - DNA, 20 bp, Artificial Sequence
  chemically synthesized
ccagccaaatgcccagcaca

SEQ ID NO: 38315 - DNA, 20 bp, Artificial Sequence
  chemically synthesized
caaatgcccagcacagagct

SEQ ID NO: 38316 - DNA, 20 bp, Artificial Sequence
  chemically synthesized
atgcccagcacagagctcag

SEQ ID NO: 38317 - DNA, 20 bp, Artificial Sequence
  chemically synthesized
gtggatttgactcttccatt

SEQ ID NO: 38318 - DNA, 20 bp, Artificial Sequence
  chemically synthesized
ctcttccattcagaaactca

SEQ ID NO: 38319 - DNA, 20 bp, Artificial Sequence
  chemically synthesized
gcacacttcattctcaatca

SEQ ID NO: 38320 - DNA, 20 bp, Artificial Sequence
  chemically synthesized
cacacttcattctcaatcac

SEQ ID NO: 38321 - DNA, 20 bp, Artificial Sequence
  chemically synthesized
acacttcattctcaatcaca

SEQ ID NO: 38322 - DNA, 20 bp, Artificial Sequence
  chemically synthesized
acttcattctcaatcacagg

SEQ ID NO: 38323 - DNA, 20 bp, Artificial Sequence
  chemically synthesized
cattctcaatcacagggagc

SEQ ID NO: 38324 - DNA, 20 bp, Artificial Sequence
  chemically synthesized
attctcaatcacagggagct

SEQ ID NO: 38325 - DNA, 20 bp, Artificial Sequence
  chemically synthesized
acagggagctgggcttcctt

SEQ ID NO: 38326 - DNA, 20 bp, Artificial Sequence
  chemically synthesized
ggagctgggcttccttgaga

SEQ ID NO: 38327 - DNA, 20 bp, Artificial Sequence
  chemically synthesized
ctgggcttccttgagaaagc

SEQ ID NO: 38328 - DNA, 20 bp, Artificial Sequence
  chemically synthesized
ccttgagaaagccagcccca

SEQ ID NO: 38329 - DNA, 20 bp, Artificial Sequence
  chemically synthesized
cttgagaaagccagccccaa

SEQ ID NO: 38330 - DNA, 20 bp, Artificial Sequence
  chemically synthesized
caaaggtacctgtgtttaaa

SEQ ID NO: 38331 - DNA, 20 bp, Artificial Sequence
  chemically synthesized
acctgtgtttaaaaagatga

SEQ ID NO: 38332 - DNA, 20 bp, Artificial Sequence
  chemically synthesized
gtttaaaaagatgaaagaaa

SEQ ID NO: 38333 - DNA, 20 bp, Artificial Sequence
  chemically synthesized
tacgtccacaacatgttcac

SEQ ID NO: 38334 - DNA, 20 bp, Artificial Sequence
  chemically synthesized
acgtccacaacatgttcaca

SEQ ID NO: 38335 - DNA, 20 bp, Artificial Sequence
  chemically synthesized
acatgttcacaaggaaactc

SEQ ID NO: 38336 - DNA, 20 bp, Artificial Sequence
  chemically synthesized
tgttcacaaggaaactccag

SEQ ID NO: 38337 - DNA, 20 bp, Artificial Sequence
  chemically synthesized
acaaggaaactccagaagaa

SEQ ID NO: 38338 - DNA, 20 bp, Artificial Sequence
  chemically synthesized
aaggaaactccagaagaaca

SEQ ID NO: 38339 - DNA, 20 bp, Artificial Sequence
  chemically synthesized
gaaactccagaagaacagag

SEQ ID NO: 38340 - DNA, 20 bp, Artificial Sequence
  chemically synthesized
actccagaagaacagagcag

SEQ ID NO: 38341 - DNA, 20 bp, Artificial Sequence
  chemically synthesized
gaagaacagagcagtggtga

SEQ ID NO: 38342 - DNA, 20 bp, Artificial Sequence
  chemically synthesized
tggacctcctgtctgtccgt

SEQ ID NO: 38343 - DNA, 20 bp, Artificial Sequence
  chemically synthesized
ggacctcctgtctgtccgtg

SEQ ID NO: 38344 - DNA, 20 bp, Artificial Sequence
  chemically synthesized
cctgtctgtccgtgaggctg

SEQ ID NO: 38345 - DNA, 20 bp, Artificial Sequence
  chemically synthesized
tccgtgaggctgtagaacac

SEQ ID NO: 38346 - DNA, 20 bp, Artificial Sequence
  chemically synthesized
ccgtgaggctgtagaacaca

SEQ ID NO: 38347 - DNA, 20 bp, Artificial Sequence
  chemically synthesized
tgaggctgtagaacacaagg

SEQ ID NO: 38348 - DNA, 20 bp, Artificial Sequence
  chemically synthesized
aaggcagctcccaatgctgc

SEQ ID NO: 38349 - DNA, 20 bp, Artificial Sequence
  chemically synthesized
ctgccagactctctgaaccc

SEQ ID NO: 38350 - DNA, 20 bp, Artificial Sequence
  chemically synthesized
gccagactctctgaaccctg

SEQ ID NO: 38351 - DNA, 20 bp, Artificial Sequence
  chemically synthesized
cagactctctgaaccctgga

SEQ ID NO: 38352 - DNA, 20 bp, Artificial Sequence
  chemically synthesized
ggagagtgtaaacgtcatat

SEQ ID NO: 38353 - DNA, 20 bp, Artificial Sequence
  chemically synthesized
agagtgtaaacgtcatataa

SEQ ID NO: 38354 - DNA, 20 bp, Artificial Sequence
  chemically synthesized
gagtctatgttccaaaaacc

SEQ ID NO: 38355 - DNA, 20 bp, Artificial Sequence
  chemically synthesized
aaacctggatttaacaatct

SEQ ID NO: 38356 - DNA, 20 bp, Artificial Sequence
  chemically synthesized
taacaatctgagctttgtca

SEQ ID NO: 38357 - DNA, 20 bp, Artificial Sequence
  chemically synthesized
agctttgtcatggtgctttg

SEQ ID NO: 38358 - DNA, 20 bp, Artificial Sequence
  chemically synthesized
ttgtcatggtgctttgcggt

SEQ ID NO: 38359 - DNA, 20 bp, Artificial Sequence
  chemically synthesized
tctttgcttttaaaaccata

SEQ ID NO: 38360 - DNA, 20 bp, Artificial Sequence
  chemically synthesized
taaagaataatgtttaaatg

SEQ ID NO: 38361 - DNA, 20 bp, Artificial Sequence
  chemically synthesized
aagaataatgtttaaatgta

SEQ ID NO: 38362 - DNA, 20 bp, Artificial Sequence
  chemically synthesized
aatgtttaaatgtagagtct

SEQ ID NO: 38363 - DNA, 20 bp, Artificial Sequence
  chemically synthesized
tgctattgtttttatatttt

SEQ ID NO: 38364 - DNA, 20 bp, Artificial Sequence
  chemically synthesized
ttcactcaacattacataat

SEQ ID NO: 38365 - DNA, 20 bp, Artificial Sequence
  chemically synthesized
attacataatgagttttgta

SEQ ID NO: 38366 - DNA, 20 bp, Artificial Sequence
  chemically synthesized
tcttcataactaatatttta

SEQ ID NO: 38367 - DNA, 20 bp, Artificial Sequence
  chemically synthesized
cttcataactaatattttaa

SEQ ID NO: 38368 - DNA, 20 bp, Artificial Sequence
  chemically synthesized
tcataactaatattttaaag

SEQ ID NO: 38369 - DNA, 20 bp, Artificial Sequence
  chemically synthesized
ataactaatattttaaagga

SEQ ID NO: 38370 - DNA, 20 bp, Artificial Sequence
  chemically synthesized
aaggagagctactgattaat

SEQ ID NO: 38371 - DNA, 20 bp, Artificial Sequence
  chemically synthesized
agctactgattaatgagcat

SEQ ID NO: 38372 - DNA, 20 bp, Artificial Sequence
  chemically synthesized
gctactgattaatgagcatg

SEQ ID NO: 38373 - DNA, 20 bp, Artificial Sequence
  chemically synthesized
aatgagcatgaggtttcctt

SEQ ID NO: 38374 - DNA, 20 bp, Artificial Sequence
  chemically synthesized
atgagcatgaggtttccttt

SEQ ID NO: 38375 - DNA, 20 bp, Artificial Sequence
  chemically synthesized
tgagcatgaggtttcctttg

SEQ ID NO: 38376 - DNA, 20 bp, Artificial Sequence
  chemically synthesized
atgaggtttcctttggggat

SEQ ID NO: 38377 - DNA, 20 bp, Artificial Sequence
  chemically synthesized
tgaggtttcctttggggatg

SEQ ID NO: 38378 - DNA, 20 bp, Artificial Sequence
  chemically synthesized
tggggatgaggaaaatattc

SEQ ID NO: 38379 - DNA, 20 bp, Artificial Sequence
  chemically synthesized
atattctggaaatatgatga

SEQ ID NO: 38380 - DNA, 20 bp, Artificial Sequence
  chemically synthesized
tgaatgtactaaatgccact

SEQ ID NO: 38381 - DNA, 20 bp, Artificial Sequence
  chemically synthesized
atgtactaaatgccacttgg

SEQ ID NO: 38382 - DNA, 20 bp, Artificial Sequence
  chemically synthesized
ttggtggtaccctgcaaaaa

SEQ ID NO: 38383 - DNA, 20 bp, Artificial Sequence
  chemically synthesized
ccctgcaaaaatggttaaaa

SEQ ID NO: 38384 - DNA, 20 bp, Artificial Sequence
  chemically synthesized
tacattttattgcaataaaa

SEQ ID NO: 38385 - DNA, 20 bp, Artificial Sequence
  chemically synthesized
tttattgcaataaaaaagaa

SEQ ID NO: 38386 - DNA, 20 bp, Artificial Sequence
  chemically synthesized
aagaatagtcatcatttact

SEQ ID NO: 38387 - DNA, 20 bp, Artificial Sequence
  chemically synthesized
ttactaagcattatcctttc

SEQ ID NO: 38388 - DNA, 20 bp, Artificial Sequence
  chemically synthesized
tactaagcattatcctttcc

SEQ ID NO: 38389 - DNA, 20 bp, Artificial Sequence
  chemically synthesized
gcattatcctttccaggcac

SEQ ID NO: 38390 - DNA, 20 bp, Artificial Sequence
  chemically synthesized
ccaggcacaagcttataatg

SEQ ID NO: 38391 - DNA, 20 bp, Artificial Sequence
  chemically synthesized
atctcacttcatcctcacaa

SEQ ID NO: 38392 - DNA, 20 bp, Artificial Sequence
  chemically synthesized
ctcacaacagtcctatgaaa

SEQ ID NO: 38393 - DNA, 20 bp, Artificial Sequence
  chemically synthesized
tcacaacagtcctatgaaac

SEQ ID NO: 38394 - DNA, 20 bp, Artificial Sequence
  chemically synthesized
caacagtcctatgaaacagg

SEQ ID NO: 38395 - DNA, 20 bp, Artificial Sequence
  chemically synthesized
gttccatcactcctgctcta

SEQ ID NO: 38396 - DNA, 20 bp, Artificial Sequence
  chemically synthesized
atcactcctgctctacagtt

SEQ ID NO: 38397 - DNA, 20 bp, Artificial Sequence
  chemically synthesized
tcactcctgctctacagtta

SEQ ID NO: 38398 - DNA, 20 bp, Artificial Sequence
  chemically synthesized
gctctacagttaaggaaact

SEQ ID NO: 38399 - DNA, 20 bp, Artificial Sequence
  chemically synthesized
ctctacagttaaggaaactg

SEQ ID NO: 38400 - DNA, 20 bp, Artificial Sequence
  chemically synthesized
agttaaggaaactgaggtgt

SEQ ID NO: 38401 - DNA, 20 bp, Artificial Sequence
  chemically synthesized
gttaaggaaactgaggtgta

SEQ ID NO: 38402 - DNA, 20 bp, Artificial Sequence
  chemically synthesized
taaggaaactgaggtgtaag

SEQ ID NO: 38403 - DNA, 20 bp, Artificial Sequence
  chemically synthesized
aaggaaactgaggtgtaagg

SEQ ID NO: 38404 - DNA, 20 bp, Artificial Sequence
  chemically synthesized
tgaggtgtaaggaggttgtc

SEQ ID NO: 38405 - DNA, 20 bp, Artificial Sequence
  chemically synthesized
gaggttgtctagttcaacct

SEQ ID NO: 38406 - DNA, 20 bp, Artificial Sequence
  chemically synthesized
tgtctagttcaacctgagcc

SEQ ID NO: 38407 - DNA, 20 bp, Artificial Sequence
  chemically synthesized
gtctagttcaacctgagcct

SEQ ID NO: 38408 - DNA, 20 bp, Artificial Sequence
  chemically synthesized
tcaacctgagcctgggtctg

SEQ ID NO: 38409 - DNA, 20 bp, Artificial Sequence
  chemically synthesized
aacctgagcctgggtctgcg

SEQ ID NO: 38410 - DNA, 20 bp, Artificial Sequence
  chemically synthesized
tgcttcctccccgtgcgcgt

SEQ ID NO: 38411 - DNA, 20 bp, Artificial Sequence
  chemically synthesized
cctccacatctttgttcata

SEQ ID NO: 38412 - DNA, 20 bp, Artificial Sequence
  chemically synthesized
cttattccttaatattttct

SEQ ID NO: 38413 - DNA, 20 bp, Artificial Sequence
  chemically synthesized
ccttaatattttctgagcct

SEQ ID NO: 38414 - DNA, 20 bp, Artificial Sequence
  chemically synthesized
ctaagttcccataaattata

SEQ ID NO: 38415 - DNA, 20 bp, Artificial Sequence
  chemically synthesized
aacactgccaatttattttc

SEQ ID NO: 38416 - DNA, 20 bp, Artificial Sequence
  chemically synthesized
actgccaatttattttctag

SEQ ID NO: 38417 - DNA, 20 bp, Artificial Sequence
  chemically synthesized
ctgccaatttattttctaga

SEQ ID NO: 38418 - DNA, 20 bp, Artificial Sequence
  chemically synthesized
tattttctagaaggttatga

SEQ ID NO: 38419 - DNA, 20 bp, Artificial Sequence
  chemically synthesized
atgacagtgtaaaatgtcac

SEQ ID NO: 38420 - DNA, 20 bp, Artificial Sequence
  chemically synthesized
tcacttcaccacacttgtat

SEQ ID NO: 38421 - DNA, 20 bp, Artificial Sequence
  chemically synthesized
agtgttcaatttttaaatat

SEQ ID NO: 38422 - DNA, 20 bp, Artificial Sequence
  chemically synthesized
ttaaatattagctaatctaa

SEQ ID NO: 38423 - DNA, 20 bp, Artificial Sequence
  chemically synthesized
taaatattagctaatctaac

SEQ ID NO: 38424 - DNA, 20 bp, Artificial Sequence
  chemically synthesized
tttatacttctttgacaatt

SEQ ID NO: 38425 - DNA, 20 bp, Artificial Sequence
  chemically synthesized
ttatacttctttgacaattt

SEQ ID NO: 38426 - DNA, 20 bp, Artificial Sequence
  chemically synthesized
atacttctttgacaatttgg

SEQ ID NO: 38427 - DNA, 20 bp, Artificial Sequence
  chemically synthesized
acttctttgacaatttggga

SEQ ID NO: 38428 - DNA, 20 bp, Artificial Sequence
  chemically synthesized
tttgacaatttgggagagtg

SEQ ID NO: 38429 - DNA, 20 bp, Artificial Sequence
  chemically synthesized
tgggagagtgaagattctcc

SEQ ID NO: 38430 - DNA, 20 bp, Artificial Sequence
  chemically synthesized
ttttctttgccaaattcaaa

SEQ ID NO: 38431 - DNA, 20 bp, Artificial Sequence
  chemically synthesized
tttgccaaattcaaatagaa

SEQ ID NO: 38432 - DNA, 20 bp, Artificial Sequence
  chemically synthesized
tagaacggttgcaaaattgc

SEQ ID NO: 38433 - DNA, 20 bp, Artificial Sequence
  chemically synthesized
gaacggttgcaaaattgcca

SEQ ID NO: 38434 - DNA, 20 bp, Artificial Sequence
  chemically synthesized
aacggttgcaaaattgccag

SEQ ID NO: 38435 - DNA, 20 bp, Artificial Sequence
  chemically synthesized
cagaggaaatgctgtttttc

SEQ ID NO: 38436 - DNA, 20 bp, Artificial Sequence
  chemically synthesized
ggaaatgctgtttttccaga

SEQ ID NO: 38437 - DNA, 20 bp, Artificial Sequence
  chemically synthesized
tttttccagatggacacacc

SEQ ID NO: 38438 - DNA, 20 bp, Artificial Sequence
  chemically synthesized
ttttccagatggacacaccc

SEQ ID NO: 38439 - DNA, 20 bp, Artificial Sequence
  chemically synthesized
tttccagatggacacaccca

SEQ ID NO: 38440 - DNA, 20 bp, Artificial Sequence
  chemically synthesized
ggacacacccagggatgttt

SEQ ID NO: 38441 - DNA, 20 bp, Artificial Sequence
  chemically synthesized
cagtgttctcacaaataatc

SEQ ID NO: 38442 - DNA, 20 bp, Artificial Sequence
  chemically synthesized
atccagttttctaattttgc

SEQ ID NO: 38443 - DNA, 20 bp, Artificial Sequence
  chemically synthesized
gttttctaattttgcaagcc

SEQ ID NO: 38444 - DNA, 20 bp, Artificial Sequence
  chemically synthesized
tttgcaagcccagctttcat

SEQ ID NO: 38445 - DNA, 20 bp, Artificial Sequence
  chemically synthesized
tgcaaaaatccttgctttgc

SEQ ID NO: 38446 - DNA, 20 bp, Artificial Sequence
  chemically synthesized
aaatccttgctttgcgagca

SEQ ID NO: 38447 - DNA, 20 bp, Artificial Sequence
  chemically synthesized
cttgctttgcgagcatggca

SEQ ID NO: 38448 - DNA, 20 bp, Artificial Sequence
  chemically synthesized
ttgctttgcgagcatggcac

SEQ ID NO: 38449 - DNA, 20 bp, Artificial Sequence
  chemically synthesized
tttgcgagcatggcacaggc

SEQ ID NO: 38450 - DNA, 20 bp, Artificial Sequence
  chemically synthesized
tgcgagcatggcacaggcaa

SEQ ID NO: 38451 - DNA, 20 bp, Artificial Sequence
  chemically synthesized
gcatggcacaggcaagagat

SEQ ID NO: 38452 - DNA, 20 bp, Artificial Sequence
  chemically synthesized
catggcacaggcaagagatg

SEQ ID NO: 38453 - DNA, 20 bp, Artificial Sequence
  chemically synthesized
gcactctctctttcttcccc

SEQ ID NO: 38454 - DNA, 20 bp, Artificial Sequence
  chemically synthesized
actctctctttcttccccca

SEQ ID NO: 38455 - DNA, 20 bp, Artificial Sequence
  chemically synthesized
ccagagcctttgactgcact

SEQ ID NO: 38456 - DNA, 20 bp, Artificial Sequence
  chemically synthesized
tgcacttagatcattgactt

SEQ ID NO: 38457 - DNA, 20 bp, Artificial Sequence
  chemically synthesized
ttagatcattgactttggtt

SEQ ID NO: 38458 - DNA, 20 bp, Artificial Sequence
  chemically synthesized
ttcagaaacctgactgcatc

SEQ ID NO: 38459 - DNA, 20 bp, Artificial Sequence
  chemically synthesized
cagaaacctgactgcatctg

SEQ ID NO: 38460 - DNA, 20 bp, Artificial Sequence
  chemically synthesized
actgcatctggagttgacat

SEQ ID NO: 38461 - DNA, 20 bp, Artificial Sequence
  chemically synthesized
gcatctggagttgacatgag

SEQ ID NO: 38462 - DNA, 20 bp, Artificial Sequence
  chemically synthesized
tggagttgacatgagcagca

SEQ ID NO: 38463 - DNA, 20 bp, Artificial Sequence
  chemically synthesized
agttgacatgagcagcatgg

SEQ ID NO: 38464 - DNA, 20 bp, Artificial Sequence
  chemically synthesized
agcatggaagatgtttgtcc

SEQ ID NO: 38465 - DNA, 20 bp, Artificial Sequence
  chemically synthesized
tttgtcccagcacctcactc

SEQ ID NO: 38466 - DNA, 20 bp, Artificial Sequence
  chemically synthesized
tgtcccagcacctcactcca

SEQ ID NO: 38467 - DNA, 20 bp, Artificial Sequence
  chemically synthesized
gtcccagcacctcactccag

SEQ ID NO: 38468 - DNA, 20 bp, Artificial Sequence
  chemically synthesized
cagcacctcactccagaggc

SEQ ID NO: 38469 - DNA, 20 bp, Artificial Sequence
  chemically synthesized
cctcactccagaggccagct

SEQ ID NO: 38470 - DNA, 20 bp, Artificial Sequence
  chemically synthesized
gaggccagctcagctcaatc

SEQ ID NO: 38471 - DNA, 20 bp, Artificial Sequence
  chemically synthesized
aggccagctcagctcaatct

SEQ ID NO: 38472 - DNA, 20 bp, Artificial Sequence
  chemically synthesized
ccagctcagctcaatctggg

SEQ ID NO: 38473 - DNA, 20 bp, Artificial Sequence
  chemically synthesized
agctcagctcaatctgggca

SEQ ID NO: 38474 - DNA, 20 bp, Artificial Sequence
  chemically synthesized
atctgggcagagctgcatga

SEQ ID NO: 38475 - DNA, 20 bp, Artificial Sequence
  chemically synthesized
tgggcagagctgcatgatgg

SEQ ID NO: 38476 - DNA, 20 bp, Artificial Sequence
  chemically synthesized
gatggaagtttctgactacc

SEQ ID NO: 38477 - DNA, 20 bp, Artificial Sequence
  chemically synthesized
agtttctgactaccaagcat

SEQ ID NO: 38478 - DNA, 20 bp, Artificial Sequence
  chemically synthesized
gtttctgactaccaagcatc

SEQ ID NO: 38479 - DNA, 20 bp, Artificial Sequence
  chemically synthesized
tctgactaccaagcatcggg

SEQ ID NO: 38480 - DNA, 20 bp, Artificial Sequence
  chemically synthesized
tgactaccaagcatcgggca

SEQ ID NO: 38481 - DNA, 20 bp, Artificial Sequence
  chemically synthesized
gactaccaagcatcgggcag

SEQ ID NO: 38482 - DNA, 20 bp, Artificial Sequence
  chemically synthesized
actaccaagcatcgggcaga

SEQ ID NO: 38483 - DNA, 20 bp, Artificial Sequence
  chemically synthesized
cgggcagagggtgcatcacc

SEQ ID NO: 38484 - DNA, 20 bp, Artificial Sequence
  chemically synthesized
ggtgcatcacctggactaca

SEQ ID NO: 38485 - DNA, 20 bp, Artificial Sequence
  chemically synthesized
cctggactacatagttgtgt

SEQ ID NO: 38486 - DNA, 20 bp, Artificial Sequence
  chemically synthesized
ctggactacatagttgtgtg

SEQ ID NO: 38487 - DNA, 20 bp, Artificial Sequence
  chemically synthesized
tggactacatagttgtgtga

SEQ ID NO: 38488 - DNA, 20 bp, Artificial Sequence
  chemically synthesized
gactacatagttgtgtgagg

SEQ ID NO: 38489 - DNA, 20 bp, Artificial Sequence
  chemically synthesized
tgtgagggagcaccgttctc

SEQ ID NO: 38490 - DNA, 20 bp, Artificial Sequence
  chemically synthesized
ttctctagaatctgctattt

SEQ ID NO: 38491 - DNA, 20 bp, Artificial Sequence
  chemically synthesized
ctagaatctgctatttgagc

SEQ ID NO: 38492 - DNA, 20 bp, Artificial Sequence
  chemically synthesized
tagaatctgctatttgagca

SEQ ID NO: 38493 - DNA, 20 bp, Artificial Sequence
  chemically synthesized
caaggcaaacatcctgataa

SEQ ID NO: 38494 - DNA, 20 bp, Artificial Sequence
  chemically synthesized
taatggtgaaaacctaccgc

SEQ ID NO: 38495 - DNA, 20 bp, Artificial Sequence
  chemically synthesized
gaaaacctaccgcaagttgc

SEQ ID NO: 38496 - DNA, 20 bp, Artificial Sequence
  chemically synthesized
aaaacctaccgcaagttgcc

SEQ ID NO: 38497 - DNA, 20 bp, Artificial Sequence
  chemically synthesized
cctaccgcaagttgccagga

SEQ ID NO: 38498 - DNA, 20 bp, Artificial Sequence
  chemically synthesized
agttgccaggaaagttgatg

SEQ ID NO: 38499 - DNA, 20 bp, Artificial Sequence
  chemically synthesized
ggaaagttgatgtggtctgc

SEQ ID NO: 38500 - DNA, 20 bp, Artificial Sequence
  chemically synthesized
aagttgatgtggtctgcgag

SEQ ID NO: 38501 - DNA, 20 bp, Artificial Sequence
  chemically synthesized
agttgatgtggtctgcgagt

SEQ ID NO: 38502 - DNA, 20 bp, Artificial Sequence
  chemically synthesized
tgcgagtaggtgctgccatc

SEQ ID NO: 38503 - DNA, 20 bp, Artificial Sequence
  chemically synthesized
gagtaggtgctgccatccag

SEQ ID NO: 38504 - DNA, 20 bp, Artificial Sequence
  chemically synthesized
ctgccatccagtggccgaca

SEQ ID NO: 38505 - DNA, 20 bp, Artificial Sequence
  chemically synthesized
gccatccagtggccgacata

SEQ ID NO: 38506 - DNA, 20 bp, Artificial Sequence
  chemically synthesized
gacatagagatgtcatctct

SEQ ID NO: 38507 - DNA, 20 bp, Artificial Sequence
  chemically synthesized
acatagagatgtcatctctg

SEQ ID NO: 38508 - DNA, 20 bp, Artificial Sequence
  chemically synthesized
catagagatgtcatctctga

SEQ ID NO: 38509 - DNA, 20 bp, Artificial Sequence
  chemically synthesized
agagatgtcatctctgaggg

SEQ ID NO: 38510 - DNA, 20 bp, Artificial Sequence
  chemically synthesized
gagatgtcatctctgagggc

SEQ ID NO: 38511 - DNA, 20 bp, Artificial Sequence
  chemically synthesized
atgtcatctctgagggcagg

SEQ ID NO: 38512 - DNA, 20 bp, Artificial Sequence
  chemically synthesized
tgtcatctctgagggcaggt

SEQ ID NO: 38513 - DNA, 20 bp, Artificial Sequence
  chemically synthesized
ctctgagggcaggtaggcca

SEQ ID NO: 38514 - DNA, 20 bp, Artificial Sequence
  chemically synthesized
tctgagggcaggtaggccac

SEQ ID NO: 38515 - DNA, 20 bp, Artificial Sequence
  chemically synthesized
gcaggtaggccacaggtgac

SEQ ID NO: 38516 - DNA, 20 bp, Artificial Sequence
  chemically synthesized
aggtaggccacaggtgacaa

SEQ ID NO: 38517 - DNA, 20 bp, Artificial Sequence
  chemically synthesized
ggtaggccacaggtgacaag

SEQ ID NO: 38518 - DNA, 20 bp, Artificial Sequence
  chemically synthesized
cacaggtgacaagaggattg

SEQ ID NO: 38519 - DNA, 20 bp, Artificial Sequence
  chemically synthesized
aggattgaagccctccctga

SEQ ID NO: 38520 - DNA, 20 bp, Artificial Sequence
  chemically synthesized
ggattgaagccctccctgat

SEQ ID NO: 38521 - DNA, 20 bp, Artificial Sequence
  chemically synthesized
gattgaagccctccctgatg

SEQ ID NO: 38522 - DNA, 20 bp, Artificial Sequence
  chemically synthesized
agccctccctgatggggcct

SEQ ID NO: 38523 - DNA, 20 bp, Artificial Sequence
  chemically synthesized
gccctccctgatggggcctt

SEQ ID NO: 38524 - DNA, 20 bp, Artificial Sequence
  chemically synthesized
ccctccctgatggggccttg

SEQ ID NO: 38525 - DNA, 20 bp, Artificial Sequence
  chemically synthesized
ctccctgatggggccttggg

SEQ ID NO: 38526 - DNA, 20 bp, Artificial Sequence
  chemically synthesized
ccctgatggggccttgggga

SEQ ID NO: 38527 - DNA, 20 bp, Artificial Sequence
  chemically synthesized
cctgatggggccttggggag

SEQ ID NO: 38528 - DNA, 20 bp, Artificial Sequence
  chemically synthesized
ctgatggggccttggggaga

SEQ ID NO: 38529 - DNA, 20 bp, Artificial Sequence
  chemically synthesized
atggggccttggggagaggg

SEQ ID NO: 38530 - DNA, 20 bp, Artificial Sequence
  chemically synthesized
gggccttggggagagggcag

SEQ ID NO: 38531 - DNA, 20 bp, Artificial Sequence
  chemically synthesized
ggccttggggagagggcagc

SEQ ID NO: 38532 - DNA, 20 bp, Artificial Sequence
  chemically synthesized
gccttggggagagggcagca

SEQ ID NO: 38533 - DNA, 20 bp, Artificial Sequence
  chemically synthesized
tggggagagggcagcagggt

SEQ ID NO: 38534 - DNA, 20 bp, Artificial Sequence
  chemically synthesized
agagggcagcagggtaagtc

SEQ ID NO: 38535 - DNA, 20 bp, Artificial Sequence
  chemically synthesized
gggcagcagggtaagtccag

SEQ ID NO: 38536 - DNA, 20 bp, Artificial Sequence
  chemically synthesized
cagcagggtaagtccagcgg

SEQ ID NO: 38537 - DNA, 20 bp, Artificial Sequence
  chemically synthesized
agcagggtaagtccagcggc

SEQ ID NO: 38538 - DNA, 20 bp, Artificial Sequence
  chemically synthesized
ggtaagtccagcggcaggat

SEQ ID NO: 38539 - DNA, 20 bp, Artificial Sequence
  chemically synthesized
caggatcagtccattgattg

SEQ ID NO: 38540 - DNA, 20 bp, Artificial Sequence
  chemically synthesized
attgtggatgacgactgacc

SEQ ID NO: 38541 - DNA, 20 bp, Artificial Sequence
  chemically synthesized
actgacctggaaaatcccct

SEQ ID NO: 38542 - DNA, 20 bp, Artificial Sequence
  chemically synthesized
ccaaactctgcatttgatcc

SEQ ID NO: 38543 - DNA, 20 bp, Artificial Sequence
  chemically synthesized
actctgcatttgatccaagt

SEQ ID NO: 38544 - DNA, 20 bp, Artificial Sequence
  chemically synthesized
ctctgcatttgatccaagtc

SEQ ID NO: 38545 - DNA, 20 bp, Artificial Sequence
  chemically synthesized
tctgcatttgatccaagtca

SEQ ID NO: 38546 - DNA, 20 bp, Artificial Sequence
  chemically synthesized
gatccaagtcagggaacacc

SEQ ID NO: 38547 - DNA, 20 bp, Artificial Sequence
  chemically synthesized
agggaacacctggaaacatg

SEQ ID NO: 38548 - DNA, 20 bp, Artificial Sequence
  chemically synthesized
gggaacacctggaaacatga

SEQ ID NO: 38549 - DNA, 20 bp, Artificial Sequence
  chemically synthesized
ggaacacctggaaacatgaa

SEQ ID NO: 38550 - DNA, 20 bp, Artificial Sequence
  chemically synthesized
gaacacctggaaacatgaag

SEQ ID NO: 38551 - DNA, 20 bp, Artificial Sequence
  chemically synthesized
acacctggaaacatgaaggg

SEQ ID NO: 38552 - DNA, 20 bp, Artificial Sequence
  chemically synthesized
acctggaaacatgaagggga

SEQ ID NO: 38553 - DNA, 20 bp, Artificial Sequence
  chemically synthesized
tggaaacatgaaggggagag

SEQ ID NO: 38554 - DNA, 20 bp, Artificial Sequence
  chemically synthesized
ggaaacatgaaggggagagc

SEQ ID NO: 38555 - DNA, 20 bp, Artificial Sequence
  chemically synthesized
gaaaactttgacctccctct

SEQ ID NO: 38556 - DNA, 20 bp, Artificial Sequence
  chemically synthesized
aaactttgacctccctctca

SEQ ID NO: 38557 - DNA, 20 bp, Artificial Sequence
  chemically synthesized
aactttgacctccctctcag

SEQ ID NO: 38558 - DNA, 20 bp, Artificial Sequence
  chemically synthesized
tgacctccctctcagaggct

SEQ ID NO: 38559 - DNA, 20 bp, Artificial Sequence
  chemically synthesized
ctgatgtcattattgacatg

SEQ ID NO: 38560 - DNA, 20 bp, Artificial Sequence
  chemically synthesized
acatgtagaaaattgatgaa

SEQ ID NO: 38561 - DNA, 20 bp, Artificial Sequence
  chemically synthesized
catgtagaaaattgatgaac

SEQ ID NO: 38562 - DNA, 20 bp, Artificial Sequence
  chemically synthesized
gaaaattgatgaacaggcct

SEQ ID NO: 38563 - DNA, 20 bp, Artificial Sequence
  chemically synthesized
caggcctgagttatgttttg

SEQ ID NO: 38564 - DNA, 20 bp, Artificial Sequence
  chemically synthesized
ttatgttttgtggcacctca

SEQ ID NO: 38565 - DNA, 20 bp, Artificial Sequence
  chemically synthesized
ttttgtggcacctcatggtc

SEQ ID NO: 38566 - DNA, 20 bp, Artificial Sequence
  chemically synthesized
gtggcacctcatggtctagt

SEQ ID NO: 38567 - DNA, 20 bp, Artificial Sequence
  chemically synthesized
catggtctagttagtgttct

SEQ ID NO: 38568 - DNA, 20 bp, Artificial Sequence
  chemically synthesized
tgttctgagaatcattttct

SEQ ID NO: 38569 - DNA, 20 bp, Artificial Sequence
  chemically synthesized
tctgagaatcattttctcag

SEQ ID NO: 38570 - DNA, 20 bp, Artificial Sequence
  chemically synthesized
tcattttctcagtggacctg

SEQ ID NO: 38571 - DNA, 20 bp, Artificial Sequence
  chemically synthesized
cattttctcagtggacctgc

SEQ ID NO: 38572 - DNA, 20 bp, Artificial Sequence
  chemically synthesized
ttctcagtggacctgcaggt

SEQ ID NO: 38573 - DNA, 20 bp, Artificial Sequence
  chemically synthesized
agtggacctgcaggtgagac

SEQ ID NO: 38574 - DNA, 20 bp, Artificial Sequence
  chemically synthesized
gtggacctgcaggtgagacc

SEQ ID NO: 38575 - DNA, 20 bp, Artificial Sequence
  chemically synthesized
acctgcaggtgagaccaggc

SEQ ID NO: 38576 - DNA, 20 bp, Artificial Sequence
  chemically synthesized
cctgcaggtgagaccaggcg

SEQ ID NO: 38577 - DNA, 20 bp, Artificial Sequence
  chemically synthesized
gcaggtgagaccaggcgagg

SEQ ID NO: 38578 - DNA, 20 bp, Artificial Sequence
  chemically synthesized
ggtgagaccaggcgaggcag

SEQ ID NO: 38579 - DNA, 20 bp, Artificial Sequence
  chemically synthesized
gaccaggcgaggcagaagcc

SEQ ID NO: 38580 - DNA, 20 bp, Artificial Sequence
  chemically synthesized
caggcgaggcagaagcctag

SEQ ID NO: 38581 - DNA, 20 bp, Artificial Sequence
  chemically synthesized
aggcgaggcagaagcctagt

SEQ ID NO: 38582 - DNA, 20 bp, Artificial Sequence
  chemically synthesized
ggcgaggcagaagcctagtg

SEQ ID NO: 38583 - DNA, 20 bp, Artificial Sequence
  chemically synthesized
gcgaggcagaagcctagtgg

SEQ ID NO: 38584 - DNA, 20 bp, Artificial Sequence
  chemically synthesized
ggcagaagcctagtggggga

SEQ ID NO: 38585 - DNA, 20 bp, Artificial Sequence
  chemically synthesized
agaagcctagtgggggatgg

SEQ ID NO: 38586 - DNA, 20 bp, Artificial Sequence
  chemically synthesized
gcctagtgggggatggtggt

SEQ ID NO: 38587 - DNA, 20 bp, Artificial Sequence
  chemically synthesized
ggatggtggttagaaatgtg

SEQ ID NO: 38588 - DNA, 20 bp, Artificial Sequence
  chemically synthesized
ggtggttagaaatgtgtgga

SEQ ID NO: 38589 - DNA, 20 bp, Artificial Sequence
  chemically synthesized
tagaaatgtgtggatggttg

SEQ ID NO: 38590 - DNA, 20 bp, Artificial Sequence
  chemically synthesized
agaaatgtgtggatggttgt

SEQ ID NO: 38591 - DNA, 20 bp, Artificial Sequence
  chemically synthesized
gaaatgtgtggatggttgtg

SEQ ID NO: 38592 - DNA, 20 bp, Artificial Sequence
  chemically synthesized
atgtgtggatggttgtgggg

SEQ ID NO: 38593 - DNA, 20 bp, Artificial Sequence
  chemically synthesized
tgtggatggttgtggggcag

SEQ ID NO: 38594 - DNA, 20 bp, Artificial Sequence
  chemically synthesized
tggttgtggggcagaagaaa

SEQ ID NO: 38595 - DNA, 20 bp, Artificial Sequence
  chemically synthesized
tgtggggcagaagaaacagc

SEQ ID NO: 38596 - DNA, 20 bp, Artificial Sequence
  chemically synthesized
ggggcagaagaaacagcaag

SEQ ID NO: 38597 - DNA, 20 bp, Artificial Sequence
  chemically synthesized
gggcagaagaaacagcaagt

SEQ ID NO: 38598 - DNA, 20 bp, Artificial Sequence
  chemically synthesized
aagaaacagcaagtaggctc

SEQ ID NO: 38599 - DNA, 20 bp, Artificial Sequence
  chemically synthesized
agaaacagcaagtaggctct

SEQ ID NO: 38600 - DNA, 20 bp, Artificial Sequence
  chemically synthesized
acagcaagtaggctctgggc

SEQ ID NO: 38601 - DNA, 20 bp, Artificial Sequence
  chemically synthesized
gctctgggccagctacaaac

SEQ ID NO: 38602 - DNA, 20 bp, Artificial Sequence
  chemically synthesized
atgatgtctactgatgatga

SEQ ID NO: 38603 - DNA, 20 bp, Artificial Sequence
  chemically synthesized
tctactgatgatgatagtga

SEQ ID NO: 38604 - DNA, 20 bp, Artificial Sequence
  chemically synthesized
actgatgatgatagtgatgg

SEQ ID NO: 38605 - DNA, 20 bp, Artificial Sequence
  chemically synthesized
gatgatgatagtgatggtgg

SEQ ID NO: 38606 - DNA, 20 bp, Artificial Sequence
  chemically synthesized
gatgatagtgatggtggtgg

SEQ ID NO: 38607 - DNA, 20 bp, Artificial Sequence
  chemically synthesized
gatagtgatggtggtggtgg

SEQ ID NO: 38608 - DNA, 20 bp, Artificial Sequence
  chemically synthesized
gatggtggtggtggtggtga

SEQ ID NO: 38609 - DNA, 20 bp, Artificial Sequence
  chemically synthesized
ggtggtggtggtggtgatgg

SEQ ID NO: 38610 - DNA, 20 bp, Artificial Sequence
  chemically synthesized
ggtggtggtggtgatggtgg

SEQ ID NO: 38611 - DNA, 20 bp, Artificial Sequence
  chemically synthesized
ggtggtggtgatggtggtgg

SEQ ID NO: 38612 - DNA, 20 bp, Artificial Sequence
  chemically synthesized
ggtggtggtaataattgtga

SEQ ID NO: 38613 - DNA, 20 bp, Artificial Sequence
  chemically synthesized
ggtggtaataattgtgatgg

SEQ ID NO: 38614 - DNA, 20 bp, Artificial Sequence
  chemically synthesized
ggtaataattgtgatggtgg

SEQ ID NO: 38615 - DNA, 20 bp, Artificial Sequence
  chemically synthesized
tggtggtggaatgatgatga

SEQ ID NO: 38616 - DNA, 20 bp, Artificial Sequence
  chemically synthesized
tggtggaatgatgatgatgg

SEQ ID NO: 38617 - DNA, 20 bp, Artificial Sequence
  chemically synthesized
tggaatgatgatgatggtgg

SEQ ID NO: 38618 - DNA, 20 bp, Artificial Sequence
  chemically synthesized
aatgatgatgatggtggtgg

SEQ ID NO: 38619 - DNA, 20 bp, Artificial Sequence
  chemically synthesized
atgatgatgatggtggtggt

SEQ ID NO: 38620 - DNA, 20 bp, Artificial Sequence
  chemically synthesized
atgatgatggtggtggtggg

SEQ ID NO: 38621 - DNA, 20 bp, Artificial Sequence
  chemically synthesized
gtggtggtgggtagtaatga

SEQ ID NO: 38622 - DNA, 20 bp, Artificial Sequence
  chemically synthesized
gtgggtagtaatgatggtgt

SEQ ID NO: 38623 - DNA, 20 bp, Artificial Sequence
  chemically synthesized
agtaatgatggtgttggtga

SEQ ID NO: 38624 - DNA, 20 bp, Artificial Sequence
  chemically synthesized
aatgatggtgttggtgatgg

SEQ ID NO: 38625 - DNA, 20 bp, Artificial Sequence
  chemically synthesized
gatggtgttggtgatggtgg

SEQ ID NO: 38626 - DNA, 20 bp, Artificial Sequence
  chemically synthesized
ggtgttggtgatggtggtag

SEQ ID NO: 38627 - DNA, 20 bp, Artificial Sequence
  chemically synthesized
ggtgatggtggtagtggtcg

SEQ ID NO: 38628 - DNA, 20 bp, Artificial Sequence
  chemically synthesized
ggtggtagtggtcgtggtga

SEQ ID NO: 38629 - DNA, 20 bp, Artificial Sequence
  chemically synthesized
agtggtcgtggtgatggtga

SEQ ID NO: 38630 - DNA, 20 bp, Artificial Sequence
  chemically synthesized
cgtggtgatggtgatagtga

SEQ ID NO: 38631 - DNA, 20 bp, Artificial Sequence
  chemically synthesized
gatggtgatagtgatagtga

SEQ ID NO: 38632 - DNA, 20 bp, Artificial Sequence
  chemically synthesized
ggtgatagtgatagtgatgg

SEQ ID NO: 38633 - DNA, 20 bp, Artificial Sequence
  chemically synthesized
gatagtgatagtgatggtgg

SEQ ID NO: 38634 - DNA, 20 bp, Artificial Sequence
  chemically synthesized
ggtggtaatgataatgctaa

SEQ ID NO: 38635 - DNA, 20 bp, Artificial Sequence
  chemically synthesized
ggtaatgataatgctaatgg

SEQ ID NO: 38636 - DNA, 20 bp, Artificial Sequence
  chemically synthesized
aatgataatgctaatggtgg

SEQ ID NO: 38637 - DNA, 20 bp, Artificial Sequence
  chemically synthesized
gataatgattatcatgatga

SEQ ID NO: 38638 - DNA, 20 bp, Artificial Sequence
  chemically synthesized
aatgattatcatgatgatag

SEQ ID NO: 38639 - DNA, 20 bp, Artificial Sequence
  chemically synthesized
gattatcatgatgatagcgg

SEQ ID NO: 38640 - DNA, 20 bp, Artificial Sequence
  chemically synthesized
catgatgatagcggtggtga

SEQ ID NO: 38641 - DNA, 20 bp, Artificial Sequence
  chemically synthesized
gatagcggtggtgatggtga

SEQ ID NO: 38642 - DNA, 20 bp, Artificial Sequence
  chemically synthesized
gatggtgatggtgatgataa

SEQ ID NO: 38643 - DNA, 20 bp, Artificial Sequence
  chemically synthesized
gatggtgatgataatggtga

SEQ ID NO: 38644 - DNA, 20 bp, Artificial Sequence
  chemically synthesized
ggtgatgataatggtgatgg

SEQ ID NO: 38645 - DNA, 20 bp, Artificial Sequence
  chemically synthesized
gatgataatggtgatggtgg

SEQ ID NO: 38646 - DNA, 20 bp, Artificial Sequence
  chemically synthesized
tggtggtagaatgatgatga

SEQ ID NO: 38647 - DNA, 20 bp, Artificial Sequence
  chemically synthesized
tagaatgatgatgatggtga

SEQ ID NO: 38648 - DNA, 20 bp, Artificial Sequence
  chemically synthesized
aatgatgatgatggtgatgg

SEQ ID NO: 38649 - DNA, 20 bp, Artificial Sequence
  chemically synthesized
gatgatgatggtgatggtgg

SEQ ID NO: 38650 - DNA, 20 bp, Artificial Sequence
  chemically synthesized
gatgatggtgatggtggtgg

SEQ ID NO: 38651 - DNA, 20 bp, Artificial Sequence
  chemically synthesized
gatggtgatggtggtggtgg

SEQ ID NO: 38652 - DNA, 20 bp, Artificial Sequence
  chemically synthesized
ggtgatggtggtggtggtgg

SEQ ID NO: 38653 - DNA, 20 bp, Artificial Sequence
  chemically synthesized
ggtggtggtagtaatgatga

SEQ ID NO: 38654 - DNA, 20 bp, Artificial Sequence
  chemically synthesized
ggtggtagtaatgatgatgg

SEQ ID NO: 38655 - DNA, 20 bp, Artificial Sequence
  chemically synthesized
ggtagtaatgatgatggtgg

SEQ ID NO: 38656 - DNA, 20 bp, Artificial Sequence
  chemically synthesized
atggtggtggtgatgatgtt

SEQ ID NO: 38657 - DNA, 20 bp, Artificial Sequence
  chemically synthesized
tggtggtggtgatgatgttg

SEQ ID NO: 38658 - DNA, 20 bp, Artificial Sequence
  chemically synthesized
ggtggtggtgatgatgttga

SEQ ID NO: 38659 - DNA, 20 bp, Artificial Sequence
  chemically synthesized
gatgttgagggtgatgataa

SEQ ID NO: 38660 - DNA, 20 bp, Artificial Sequence
  chemically synthesized
gagggtgatgataatagtga

SEQ ID NO: 38661 - DNA, 20 bp, Artificial Sequence
  chemically synthesized
ggtgatgataatagtgacag

SEQ ID NO: 38662 - DNA, 20 bp, Artificial Sequence
  chemically synthesized
gatgataatagtgacagtgg

SEQ ID NO: 38663 - DNA, 20 bp, Artificial Sequence
  chemically synthesized
gataatagtgacagtggtgg

SEQ ID NO: 38664 - DNA, 20 bp, Artificial Sequence
  chemically synthesized
agtggtggtggtaatgataa

SEQ ID NO: 38665 - DNA, 20 bp, Artificial Sequence
  chemically synthesized
ggtggtaatgataatggtga

SEQ ID NO: 38666 - DNA, 20 bp, Artificial Sequence
  chemically synthesized
ggtaatgataatggtgatgg

SEQ ID NO: 38667 - DNA, 20 bp, Artificial Sequence
  chemically synthesized
taatggtgatggtggaatga

SEQ ID NO: 38668 - DNA, 20 bp, Artificial Sequence
  chemically synthesized
tgatggtggaatgatggtga

SEQ ID NO: 38669 - DNA, 20 bp, Artificial Sequence
  chemically synthesized
tggtggaatgatggtgatgg

SEQ ID NO: 38670 - DNA, 20 bp, Artificial Sequence
  chemically synthesized
tggaatgatggtgatggtgg

SEQ ID NO: 38671 - DNA, 20 bp, Artificial Sequence
  chemically synthesized
tgatggtggtggaatgatga

SEQ ID NO: 38672 - DNA, 20 bp, Artificial Sequence
  chemically synthesized
tggtggtggaatgatgatgg

SEQ ID NO: 38673 - DNA, 20 bp, Artificial Sequence
  chemically synthesized
ggaatgatgatggtggtgct

SEQ ID NO: 38674 - DNA, 20 bp, Artificial Sequence
  chemically synthesized
atgatgatggtggtgctgag

SEQ ID NO: 38675 - DNA, 20 bp, Artificial Sequence
  chemically synthesized
gtggtgctgagtagtaatga

SEQ ID NO: 38676 - DNA, 20 bp, Artificial Sequence
  chemically synthesized
ctgagtagtaatgatggtga

SEQ ID NO: 38677 - DNA, 20 bp, Artificial Sequence
  chemically synthesized
agtagtaatgatggtgatgg

SEQ ID NO: 38678 - DNA, 20 bp, Artificial Sequence
  chemically synthesized
agtaatgatggtgatggtgg

SEQ ID NO: 38679 - DNA, 20 bp, Artificial Sequence
  chemically synthesized
aatgatggtgatggtggtgg

SEQ ID NO: 38680 - DNA, 20 bp, Artificial Sequence
  chemically synthesized
ggtgatggtggtggtggctg

SEQ ID NO: 38681 - DNA, 20 bp, Artificial Sequence
  chemically synthesized
ggtggtggctgtggtgatga

SEQ ID NO: 38682 - DNA, 20 bp, Artificial Sequence
  chemically synthesized
ggtggctgtggtgatgatgg

SEQ ID NO: 38683 - DNA, 20 bp, Artificial Sequence
  chemically synthesized
ggctgtggtgatgatggtgg

SEQ ID NO: 38684 - DNA, 20 bp, Artificial Sequence
  chemically synthesized
tgtggtgatgatggtggtgg

SEQ ID NO: 38685 - DNA, 20 bp, Artificial Sequence
  chemically synthesized
ggtgatgatggtggtggtag

SEQ ID NO: 38686 - DNA, 20 bp, Artificial Sequence
  chemically synthesized
gatgatggtggtggtagtgg

SEQ ID NO: 38687 - DNA, 20 bp, Artificial Sequence
  chemically synthesized
ggtagtggtagtaacgatga

SEQ ID NO: 38688 - DNA, 20 bp, Artificial Sequence
  chemically synthesized
agtggtagtaacgatgatgg

SEQ ID NO: 38689 - DNA, 20 bp, Artificial Sequence
  chemically synthesized
ggtagtaacgatgatggtgg

SEQ ID NO: 38690 - DNA, 20 bp, Artificial Sequence
  chemically synthesized
gatgatggtggtggtgatga

SEQ ID NO: 38691 - DNA, 20 bp, Artificial Sequence
  chemically synthesized
ggtggtgatgatagtgatga

SEQ ID NO: 38692 - DNA, 20 bp, Artificial Sequence
  chemically synthesized
gtgatgatggtgatgatgtt

SEQ ID NO: 38693 - DNA, 20 bp, Artificial Sequence
  chemically synthesized
tgatgatggtgatgatgttg

SEQ ID NO: 38694 - DNA, 20 bp, Artificial Sequence
  chemically synthesized
gatgatggtgatgatgttga

SEQ ID NO: 38695 - DNA, 20 bp, Artificial Sequence
  chemically synthesized
gatgttgagggtgatgataa

SEQ ID NO: 38696 - DNA, 20 bp, Artificial Sequence
  chemically synthesized
gagggtgatgataatagtga

SEQ ID NO: 38697 - DNA, 20 bp, Artificial Sequence
  chemically synthesized
ggtgatgataatagtgatag

SEQ ID NO: 38698 - DNA, 20 bp, Artificial Sequence
  chemically synthesized
gatgataatagtgatagcgg

SEQ ID NO: 38699 - DNA, 20 bp, Artificial Sequence
  chemically synthesized
taccaccaccatcatcacca

SEQ ID NO: 38700 - DNA, 20 bp, Artificial Sequence
  chemically synthesized
ccatcaccatcattactact

SEQ ID NO: 38701 - DNA, 20 bp, Artificial Sequence
  chemically synthesized
attatcattaccaccaccat

SEQ ID NO: 38702 - DNA, 20 bp, Artificial Sequence
  chemically synthesized
accaccatcactatcatcat

SEQ ID NO: 38703 - DNA, 20 bp, Artificial Sequence
  chemically synthesized
accatcactatcatcatcag

SEQ ID NO: 38704 - DNA, 20 bp, Artificial Sequence
  chemically synthesized
atcagtagacatcatataac

SEQ ID NO: 38705 - DNA, 20 bp, Artificial Sequence
  chemically synthesized
gacatcatataaccagtttg

SEQ ID NO: 38706 - DNA, 20 bp, Artificial Sequence
  chemically synthesized
tcatataaccagtttgtagc

SEQ ID NO: 38707 - DNA, 20 bp, Artificial Sequence
  chemically synthesized
taaccagtttgtagctggcc

SEQ ID NO: 38708 - DNA, 20 bp, Artificial Sequence
  chemically synthesized
accagtttgtagctggccca

SEQ ID NO: 38709 - DNA, 20 bp, Artificial Sequence
  chemically synthesized
ttctaaccaccatcccccac

SEQ ID NO: 38710 - DNA, 20 bp, Artificial Sequence
  chemically synthesized
tctaaccaccatcccccact

SEQ ID NO: 38711 - DNA, 20 bp, Artificial Sequence
  chemically synthesized
cactaggcttctgcctcgcc

SEQ ID NO: 38712 - DNA, 20 bp, Artificial Sequence
  chemically synthesized
gcctcgcctggtctcacctg

SEQ ID NO: 38713 - DNA, 20 bp, Artificial Sequence
  chemically synthesized
cctcgcctggtctcacctgc

SEQ ID NO: 38714 - DNA, 20 bp, Artificial Sequence
  chemically synthesized
gtctcacctgcaggtccact

SEQ ID NO: 38715 - DNA, 20 bp, Artificial Sequence
  chemically synthesized
tccactgagaaaatgattct

SEQ ID NO: 38716 - DNA, 20 bp, Artificial Sequence
  chemically synthesized
atgattctcagaacactaac

SEQ ID NO: 38717 - DNA, 20 bp, Artificial Sequence
  chemically synthesized
cagaacactaactagaccat

SEQ ID NO: 38718 - DNA, 20 bp, Artificial Sequence
  chemically synthesized
agaacactaactagaccatg

SEQ ID NO: 38719 - DNA, 20 bp, Artificial Sequence
  chemically synthesized
aggtgccacaaaacataact

SEQ ID NO: 38720 - DNA, 20 bp, Artificial Sequence
  chemically synthesized
ggtgccacaaaacataactc

SEQ ID NO: 38721 - DNA, 20 bp, Artificial Sequence
  chemically synthesized
ctacatgtcaataatgacat

SEQ ID NO: 38722 - DNA, 20 bp, Artificial Sequence
  chemically synthesized
tacatgtcaataatgacatc

SEQ ID NO: 38723 - DNA, 20 bp, Artificial Sequence
  chemically synthesized
aataatgacatcaggtcaat

SEQ ID NO: 38724 - DNA, 20 bp, Artificial Sequence
  chemically synthesized
atcaggtcaattggcgttct

SEQ ID NO: 38725 - DNA, 20 bp, Artificial Sequence
  chemically synthesized
aattggcgttctcagcctct

SEQ ID NO: 38726 - DNA, 20 bp, Artificial Sequence
  chemically synthesized
ttggcgttctcagcctctga

SEQ ID NO: 38727 - DNA, 20 bp, Artificial Sequence
  chemically synthesized
tggcgttctcagcctctgag

SEQ ID NO: 38728 - DNA, 20 bp, Artificial Sequence
  chemically synthesized
ggcgttctcagcctctgaga

SEQ ID NO: 38729 - DNA, 20 bp, Artificial Sequence
  chemically synthesized
cgttctcagcctctgagagg

SEQ ID NO: 38730 - DNA, 20 bp, Artificial Sequence
  chemically synthesized
gttctcagcctctgagaggg

SEQ ID NO: 38731 - DNA, 20 bp, Artificial Sequence
  chemically synthesized
agcctctgagagggaggtca

SEQ ID NO: 38732 - DNA, 20 bp, Artificial Sequence
  chemically synthesized
tgctctccccttcatgtttc

SEQ ID NO: 38733 - DNA, 20 bp, Artificial Sequence
  chemically synthesized
gctctccccttcatgtttcc

SEQ ID NO: 38734 - DNA, 20 bp, Artificial Sequence
  chemically synthesized
tttccaggtgttccctgact

SEQ ID NO: 38735 - DNA, 20 bp, Artificial Sequence
  chemically synthesized
tccctgacttggatcaaatg

SEQ ID NO: 38736 - DNA, 20 bp, Artificial Sequence
  chemically synthesized
cctgacttggatcaaatgca

SEQ ID NO: 38737 - DNA, 20 bp, Artificial Sequence
  chemically synthesized
cttggatcaaatgcagagtt

SEQ ID NO: 38738 - DNA, 20 bp, Artificial Sequence
  chemically synthesized
tggatcaaatgcagagtttg

SEQ ID NO: 38739 - DNA, 20 bp, Artificial Sequence
  chemically synthesized
ggatcaaatgcagagtttgg

SEQ ID NO: 38740 - DNA, 20 bp, Artificial Sequence
  chemically synthesized
atgcagagtttggaggtgtt

SEQ ID NO: 38741 - DNA, 20 bp, Artificial Sequence
  chemically synthesized
tgcagagtttggaggtgttg

SEQ ID NO: 38742 - DNA, 20 bp, Artificial Sequence
  chemically synthesized
agtttggaggtgttgaggcc

SEQ ID NO: 38743 - DNA, 20 bp, Artificial Sequence
  chemically synthesized
gtttggaggtgttgaggcca

SEQ ID NO: 38744 - DNA, 20 bp, Artificial Sequence
  chemically synthesized
tttggaggtgttgaggccaa

SEQ ID NO: 38745 - DNA, 20 bp, Artificial Sequence
  chemically synthesized
ttggaggtgttgaggccaag

SEQ ID NO: 38746 - DNA, 20 bp, Artificial Sequence
  chemically synthesized
ttgaggccaaggggattttc

SEQ ID NO: 38747 - DNA, 20 bp, Artificial Sequence
  chemically synthesized
tgaggccaaggggattttcc

SEQ ID NO: 38748 - DNA, 20 bp, Artificial Sequence
  chemically synthesized
gccaaggggattttccaggt

SEQ ID NO: 38749 - DNA, 20 bp, Artificial Sequence
  chemically synthesized
cagtcgtcatccacaatcaa

SEQ ID NO: 38750 - DNA, 20 bp, Artificial Sequence
  chemically synthesized
caatggactgatcctgccgc

SEQ ID NO: 38751 - DNA, 20 bp, Artificial Sequence
  chemically synthesized
taccctgctgccctctcccc

SEQ ID NO: 38752 - DNA, 20 bp, Artificial Sequence
  chemically synthesized
accctgctgccctctcccca

SEQ ID NO: 38753 - DNA, 20 bp, Artificial Sequence
  chemically synthesized
ccctctccccaaggccccat

SEQ ID NO: 38754 - DNA, 20 bp, Artificial Sequence
  chemically synthesized
cctctccccaaggccccatc

SEQ ID NO: 38755 - DNA, 20 bp, Artificial Sequence
  chemically synthesized
ctctccccaaggccccatca

SEQ ID NO: 38756 - DNA, 20 bp, Artificial Sequence
  chemically synthesized
ctccccaaggccccatcagg

SEQ ID NO: 38757 - DNA, 20 bp, Artificial Sequence
  chemically synthesized
tccccaaggccccatcaggg

SEQ ID NO: 38758 - DNA, 20 bp, Artificial Sequence
  chemically synthesized
ccccaaggccccatcaggga

SEQ ID NO: 38759 - DNA, 20 bp, Artificial Sequence
  chemically synthesized
ttcaatcctcttgtcacctg

SEQ ID NO: 38760 - DNA, 20 bp, Artificial Sequence
  chemically synthesized
acctgtggcctacctgccct

SEQ ID NO: 38761 - DNA, 20 bp, Artificial Sequence
  chemically synthesized
ctgtggcctacctgccctca

SEQ ID NO: 38762 - DNA, 20 bp, Artificial Sequence
  chemically synthesized
cagagatgacatctctatgt

SEQ ID NO: 38763 - DNA, 20 bp, Artificial Sequence
  chemically synthesized
gacatctctatgtcggccac

SEQ ID NO: 38764 - DNA, 20 bp, Artificial Sequence
  chemically synthesized
tctctatgtcggccactgga

SEQ ID NO: 38765 - DNA, 20 bp, Artificial Sequence
  chemically synthesized
ctatgtcggccactggatgg

SEQ ID NO: 38766 - DNA, 20 bp, Artificial Sequence
  chemically synthesized
tggatggcagcacctactcg

SEQ ID NO: 38767 - DNA, 20 bp, Artificial Sequence
  chemically synthesized
gcagaccacatcaactttcc

SEQ ID NO: 38768 - DNA, 20 bp, Artificial Sequence
  chemically synthesized
tcaactttcctggcaacttg

SEQ ID NO: 38769 - DNA, 20 bp, Artificial Sequence
  chemically synthesized
actttcctggcaacttgcgg

SEQ ID NO: 38770 - DNA, 20 bp, Artificial Sequence
  chemically synthesized
ctttcctggcaacttgcggt

SEQ ID NO: 38771 - DNA, 20 bp, Artificial Sequence
  chemically synthesized
cggtaggttttcaccattat

SEQ ID NO: 38772 - DNA, 20 bp, Artificial Sequence
  chemically synthesized
ggtaggttttcaccattatc

SEQ ID NO: 38773 - DNA, 20 bp, Artificial Sequence
  chemically synthesized
ggatgtttgccttgctcaaa

SEQ ID NO: 38774 - DNA, 20 bp, Artificial Sequence
  chemically synthesized
tgtttgccttgctcaaatag

SEQ ID NO: 38775 - DNA, 20 bp, Artificial Sequence
  chemically synthesized
cttgctcaaatagcagattc

SEQ ID NO: 38776 - DNA, 20 bp, Artificial Sequence
  chemically synthesized
tgctcaaatagcagattcta

SEQ ID NO: 38777 - DNA, 20 bp, Artificial Sequence
  chemically synthesized
aaatagcagattctagagaa

SEQ ID NO: 38778 - DNA, 20 bp, Artificial Sequence
  chemically synthesized
tgctccctcacacaactatg

SEQ ID NO: 38779 - DNA, 20 bp, Artificial Sequence
  chemically synthesized
cctcacacaactatgtagtc

SEQ ID NO: 38780 - DNA, 20 bp, Artificial Sequence
  chemically synthesized
ctcacacaactatgtagtcc

SEQ ID NO: 38781 - DNA, 20 bp, Artificial Sequence
  chemically synthesized
tgcaccctctgcccgatgct

SEQ ID NO: 38782 - DNA, 20 bp, Artificial Sequence
  chemically synthesized
accctctgcccgatgcttgg

SEQ ID NO: 38783 - DNA, 20 bp, Artificial Sequence
  chemically synthesized
tctgcccgatgcttggtagt

SEQ ID NO: 38784 - DNA, 20 bp, Artificial Sequence
  chemically synthesized
agtcagaaacttccatcatg

SEQ ID NO: 38785 - DNA, 20 bp, Artificial Sequence
  chemically synthesized
ttccatcatgcagctctgcc

SEQ ID NO: 38786 - DNA, 20 bp, Artificial Sequence
  chemically synthesized
catgcagctctgcccagatt

SEQ ID NO: 38787 - DNA, 20 bp, Artificial Sequence
  chemically synthesized
agctctgcccagattgagct

SEQ ID NO: 38788 - DNA, 20 bp, Artificial Sequence
  chemically synthesized
ctgcccagattgagctgagc

SEQ ID NO: 38789 - DNA, 20 bp, Artificial Sequence
  chemically synthesized
gattgagctgagctggcctc

SEQ ID NO: 38790 - DNA, 20 bp, Artificial Sequence
  chemically synthesized
ttgagctgagctggcctctg

SEQ ID NO: 38791 - DNA, 20 bp, Artificial Sequence
  chemically synthesized
gctgagctggcctctggagt

SEQ ID NO: 38792 - DNA, 20 bp, Artificial Sequence
  chemically synthesized
ctgagctggcctctggagtg

SEQ ID NO: 38793 - DNA, 20 bp, Artificial Sequence
  chemically synthesized
tggcctctggagtgaggtgc

SEQ ID NO: 38794 - DNA, 20 bp, Artificial Sequence
  chemically synthesized
ggcctctggagtgaggtgct

SEQ ID NO: 38795 - DNA, 20 bp, Artificial Sequence
  chemically synthesized
catgctgctcatgtcaactc

SEQ ID NO: 38796 - DNA, 20 bp, Artificial Sequence
  chemically synthesized
gctcatgtcaactccagatg

SEQ ID NO: 38797 - DNA, 20 bp, Artificial Sequence
  chemically synthesized
atgtcaactccagatgcagt

SEQ ID NO: 38798 - DNA, 20 bp, Artificial Sequence
  chemically synthesized
tgtcaactccagatgcagtc

SEQ ID NO: 38799 - DNA, 20 bp, Artificial Sequence
  chemically synthesized
gcagtcaggtttctgaacca

SEQ ID NO: 38800 - DNA, 20 bp, Artificial Sequence
  chemically synthesized
tgaaccaaagtcaatgatct

SEQ ID NO: 38801 - DNA, 20 bp, Artificial Sequence
  chemically synthesized
caaagtcaatgatctaagtg

SEQ ID NO: 38802 - DNA, 20 bp, Artificial Sequence
  chemically synthesized
caatgatctaagtgcagtca

SEQ ID NO: 38803 - DNA, 20 bp, Artificial Sequence
  chemically synthesized
aatgatctaagtgcagtcaa

SEQ ID NO: 38804 - DNA, 20 bp, Artificial Sequence
  chemically synthesized
ctaagtgcagtcaaaggctc

SEQ ID NO: 38805 - DNA, 20 bp, Artificial Sequence
  chemically synthesized
taagtgcagtcaaaggctct

SEQ ID NO: 38806 - DNA, 20 bp, Artificial Sequence
  chemically synthesized
aagtgcagtcaaaggctctg

SEQ ID NO: 38807 - DNA, 20 bp, Artificial Sequence
  chemically synthesized
agtgcagtcaaaggctctgg

SEQ ID NO: 38808 - DNA, 20 bp, Artificial Sequence
  chemically synthesized
gcagtcaaaggctctggggg

SEQ ID NO: 38809 - DNA, 20 bp, Artificial Sequence
  chemically synthesized
tcaaaggctctgggggaaga

SEQ ID NO: 38810 - DNA, 20 bp, Artificial Sequence
  chemically synthesized
aaaggctctgggggaagaaa

SEQ ID NO: 38811 - DNA, 20 bp, Artificial Sequence
  chemically synthesized
aggctctgggggaagaaaga

SEQ ID NO: 38812 - DNA, 20 bp, Artificial Sequence
  chemically synthesized
gctctgggggaagaaagaga

SEQ ID NO: 38813 - DNA, 20 bp, Artificial Sequence
  chemically synthesized
ttgcctgtgccatgctcgca

SEQ ID NO: 38814 - DNA, 20 bp, Artificial Sequence
  chemically synthesized
ctgtgccatgctcgcaaagc

SEQ ID NO: 38815 - DNA, 20 bp, Artificial Sequence
  chemically synthesized
tgtgccatgctcgcaaagca

SEQ ID NO: 38816 - DNA, 20 bp, Artificial Sequence
  chemically synthesized
tttttgcaaaattctaatga

SEQ ID NO: 38817 - DNA, 20 bp, Artificial Sequence
  chemically synthesized
tgcaaaattctaatgaaagc

SEQ ID NO: 38818 - DNA, 20 bp, Artificial Sequence
  chemically synthesized
gcaaaattctaatgaaagct

SEQ ID NO: 38819 - DNA, 20 bp, Artificial Sequence
  chemically synthesized
gaaagctgggcttgcaaaat

SEQ ID NO: 38820 - DNA, 20 bp, Artificial Sequence
  chemically synthesized
ggcttgcaaaattagaaaac

SEQ ID NO: 38821 - DNA, 20 bp, Artificial Sequence
  chemically synthesized
tagaaaactggattatttgt

SEQ ID NO: 38822 - DNA, 20 bp, Artificial Sequence
  chemically synthesized
tgagaacactgaaacatccc

SEQ ID NO: 38823 - DNA, 20 bp, Artificial Sequence
  chemically synthesized
gagaacactgaaacatccct

SEQ ID NO: 38824 - DNA, 20 bp, Artificial Sequence
  chemically synthesized
catccctgggtgtgtccatc

SEQ ID NO: 38825 - DNA, 20 bp, Artificial Sequence
  chemically synthesized
ggtgtgtccatctggaaaaa

SEQ ID NO: 38826 - DNA, 20 bp, Artificial Sequence
  chemically synthesized
tggaaaaacagcatttcctc

SEQ ID NO: 38827 - DNA, 20 bp, Artificial Sequence
  chemically synthesized
gcaaccgttctatttgaatt

SEQ ID NO: 38828 - DNA, 20 bp, Artificial Sequence
  chemically synthesized
cgttctatttgaatttggca

SEQ ID NO: 38829 - DNA, 20 bp, Artificial Sequence
  chemically synthesized
tgaatttggcaaagaaaata

SEQ ID NO: 38830 - DNA, 20 bp, Artificial Sequence
  chemically synthesized
atttggcaaagaaaataaag

SEQ ID NO: 38831 - DNA, 20 bp, Artificial Sequence
  chemically synthesized
aataaagcagtttttcacaa

SEQ ID NO: 38832 - DNA, 20 bp, Artificial Sequence
  chemically synthesized
cacaaaagaataaacacaac

SEQ ID NO: 38833 - DNA, 20 bp, Artificial Sequence
  chemically synthesized
acaaaagaataaacacaacc

SEQ ID NO: 38834 - DNA, 20 bp, Artificial Sequence
  chemically synthesized
aaaagaataaacacaaccag

SEQ ID NO: 38835 - DNA, 20 bp, Artificial Sequence
  chemically synthesized
ttcactctcccaaattgtca

SEQ ID NO: 38836 - DNA, 20 bp, Artificial Sequence
  chemically synthesized
actctcccaaattgtcaaag

SEQ ID NO: 38837 - DNA, 20 bp, Artificial Sequence
  chemically synthesized
attgtcaaagaagtataaat

SEQ ID NO: 38838 - DNA, 20 bp, Artificial Sequence
  chemically synthesized
gtataaattagaaaatgaat

SEQ ID NO: 38839 - DNA, 20 bp, Artificial Sequence
  chemically synthesized
tataaattagaaaatgaatc

SEQ ID NO: 38840 - DNA, 20 bp, Artificial Sequence
  chemically synthesized
tcaggacaatttcaacctgt

SEQ ID NO: 38841 - DNA, 20 bp, Artificial Sequence
  chemically synthesized
acaatttcaacctgttagat

SEQ ID NO: 38842 - DNA, 20 bp, Artificial Sequence
  chemically synthesized
taaaaattgaacactcatac

SEQ ID NO: 38843 - DNA, 20 bp, Artificial Sequence
  chemically synthesized
attgaacactcatacaagtg

SEQ ID NO: 38844 - DNA, 20 bp, Artificial Sequence
  chemically synthesized
acactcatacaagtgtggtg

SEQ ID NO: 38845 - DNA, 20 bp, Artificial Sequence
  chemically synthesized
gtggtgaagtgattgttttc

SEQ ID NO: 38846 - DNA, 20 bp, Artificial Sequence
  chemically synthesized
tttacactgtcataaccttc

SEQ ID NO: 38847 - DNA, 20 bp, Artificial Sequence
  chemically synthesized
taaccttctagaaaataaat

SEQ ID NO: 38848 - DNA, 20 bp, Artificial Sequence
  chemically synthesized
ccttctagaaaataaattgg

SEQ ID NO: 38849 - DNA, 20 bp, Artificial Sequence
  chemically synthesized
aaataaattggcagtgttat

SEQ ID NO: 38850 - DNA, 20 bp, Artificial Sequence
  chemically synthesized
aataaattggcagtgttatt

SEQ ID NO: 38851 - DNA, 20 bp, Artificial Sequence
  chemically synthesized
taaattggcagtgttattgg

SEQ ID NO: 38852 - DNA, 20 bp, Artificial Sequence
  chemically synthesized
ttggcagtgttattgggaga

SEQ ID NO: 38853 - DNA, 20 bp, Artificial Sequence
  chemically synthesized
aaatatgtctatataattta

SEQ ID NO: 38854 - DNA, 20 bp, Artificial Sequence
  chemically synthesized
aatatgtctatataatttat

SEQ ID NO: 38855 - DNA, 20 bp, Artificial Sequence
  chemically synthesized
ctatataatttatgggaact

SEQ ID NO: 38856 - DNA, 20 bp, Artificial Sequence
  chemically synthesized
tatataatttatgggaactt

SEQ ID NO: 38857 - DNA, 20 bp, Artificial Sequence
  chemically synthesized
aatttatgggaacttaggct

SEQ ID NO: 38858 - DNA, 20 bp, Artificial Sequence
  chemically synthesized
acttaggctcagaaaatatt

SEQ ID NO: 38859 - DNA, 20 bp, Artificial Sequence
  chemically synthesized
cttaggctcagaaaatatta

SEQ ID NO: 38860 - DNA, 20 bp, Artificial Sequence
  chemically synthesized
ctcagaaaatattaaggaat

SEQ ID NO: 38861 - DNA, 20 bp, Artificial Sequence
  chemically synthesized
aagaatgaactttatgaaca

SEQ ID NO: 38862 - DNA, 20 bp, Artificial Sequence
  chemically synthesized
gaactttatgaacaaagatg

SEQ ID NO: 38863 - DNA, 20 bp, Artificial Sequence
  chemically synthesized
actttatgaacaaagatgtg

SEQ ID NO: 38864 - DNA, 20 bp, Artificial Sequence
  chemically synthesized
ctttatgaacaaagatgtgg

SEQ ID NO: 38865 - DNA, 20 bp, Artificial Sequence
  chemically synthesized
tttatgaacaaagatgtgga

SEQ ID NO: 38866 - DNA, 20 bp, Artificial Sequence
  chemically synthesized
tgaacaaagatgtggagggt

SEQ ID NO: 38867 - DNA, 20 bp, Artificial Sequence
  chemically synthesized
acaaagatgtggagggttgg

SEQ ID NO: 38868 - DNA, 20 bp, Artificial Sequence
  chemically synthesized
agatgtggagggttggaagc

SEQ ID NO: 38869 - DNA, 20 bp, Artificial Sequence
  chemically synthesized
atgtggagggttggaagcaa

SEQ ID NO: 38870 - DNA, 20 bp, Artificial Sequence
  chemically synthesized
tgtggagggttggaagcaag

SEQ ID NO: 38871 - DNA, 20 bp, Artificial Sequence
  chemically synthesized
gtggagggttggaagcaaga

SEQ ID NO: 38872 - DNA, 20 bp, Artificial Sequence
  chemically synthesized
tggagggttggaagcaagag

SEQ ID NO: 38873 - DNA, 20 bp, Artificial Sequence
  chemically synthesized
ggagggttggaagcaagagg

SEQ ID NO: 38874 - DNA, 20 bp, Artificial Sequence
  chemically synthesized
gagggttggaagcaagaggg

SEQ ID NO: 38875 - DNA, 20 bp, Artificial Sequence
  chemically synthesized
aagaggggggccaacgcgca

SEQ ID NO: 38876 - DNA, 20 bp, Artificial Sequence
  chemically synthesized
agaggggggccaacgcgcac

SEQ ID NO: 38877 - DNA, 20 bp, Artificial Sequence
  chemically synthesized
gaggggggccaacgcgcacg

SEQ ID NO: 38878 - DNA, 20 bp, Artificial Sequence
  chemically synthesized
ggggggccaacgcgcacggg

SEQ ID NO: 38879 - DNA, 20 bp, Artificial Sequence
  chemically synthesized
gggggccaacgcgcacgggg

SEQ ID NO: 38880 - DNA, 20 bp, Artificial Sequence
  chemically synthesized
ggccaacgcgcacggggagg

SEQ ID NO: 38881 - DNA, 20 bp, Artificial Sequence
  chemically synthesized
gcgcacggggaggaagcatt

SEQ ID NO: 38882 - DNA, 20 bp, Artificial Sequence
  chemically synthesized
cgcacggggaggaagcattt

SEQ ID NO: 38883 - DNA, 20 bp, Artificial Sequence
  chemically synthesized
acggggaggaagcatttggg

SEQ ID NO: 38884 - DNA, 20 bp, Artificial Sequence
  chemically synthesized
gcatttgggcagtgactccg

SEQ ID NO: 38885 - DNA, 20 bp, Artificial Sequence
  chemically synthesized
gggcagtgactccgcagacc

SEQ ID NO: 38886 - DNA, 20 bp, Artificial Sequence
  chemically synthesized
ggcagtgactccgcagaccc

SEQ ID NO: 38887 - DNA, 20 bp, Artificial Sequence
  chemically synthesized
tgactccgcagacccaggct

SEQ ID NO: 38888 - DNA, 20 bp, Artificial Sequence
  chemically synthesized
gactccgcagacccaggctc

SEQ ID NO: 38889 - DNA, 20 bp, Artificial Sequence
  chemically synthesized
gacccaggctcaggttgaac

SEQ ID NO: 38890 - DNA, 20 bp, Artificial Sequence
  chemically synthesized
tagacaacctccttacacct

SEQ ID NO: 38891 - DNA, 20 bp, Artificial Sequence
  chemically synthesized
cacctcagtttccttaactg

SEQ ID NO: 38892 - DNA, 20 bp, Artificial Sequence
  chemically synthesized
cctcagtttccttaactgta

SEQ ID NO: 38893 - DNA, 20 bp, Artificial Sequence
  chemically synthesized
cagtttccttaactgtagag

SEQ ID NO: 38894 - DNA, 20 bp, Artificial Sequence
  chemically synthesized
agtttccttaactgtagagc

SEQ ID NO: 38895 - DNA, 20 bp, Artificial Sequence
  chemically synthesized
tttccttaactgtagagcag

SEQ ID NO: 38896 - DNA, 20 bp, Artificial Sequence
  chemically synthesized
taactgtagagcaggagtga

SEQ ID NO: 38897 - DNA, 20 bp, Artificial Sequence
  chemically synthesized
tgatggaactgcctgtttca

SEQ ID NO: 38898 - DNA, 20 bp, Artificial Sequence
  chemically synthesized
gatggaactgcctgtttcat

SEQ ID NO: 38899 - DNA, 20 bp, Artificial Sequence
  chemically synthesized
ctgtttcataggactgttgt

SEQ ID NO: 38900 - DNA, 20 bp, Artificial Sequence
  chemically synthesized
tgtttcataggactgttgtg

SEQ ID NO: 38901 - DNA, 20 bp, Artificial Sequence
  chemically synthesized
ataggactgttgtgaggatg

SEQ ID NO: 38902 - DNA, 20 bp, Artificial Sequence
  chemically synthesized
gactgttgtgaggatgaagt

SEQ ID NO: 38903 - DNA, 20 bp, Artificial Sequence
  chemically synthesized
agtgagatacaccacattat

SEQ ID NO: 38904 - DNA, 20 bp, Artificial Sequence
  chemically synthesized
ccacattataagcttgtgcc

SEQ ID NO: 38905 - DNA, 20 bp, Artificial Sequence
  chemically synthesized
attataagcttgtgcctgga

SEQ ID NO: 38906 - DNA, 20 bp, Artificial Sequence
  chemically synthesized
ttataagcttgtgcctggaa

SEQ ID NO: 38907 - DNA, 20 bp, Artificial Sequence
  chemically synthesized
tgcctggaaaggataatgct

SEQ ID NO: 38908 - DNA, 20 bp, Artificial Sequence
  chemically synthesized
ttattgcaataaaatgtaca

SEQ ID NO: 38909 - DNA, 20 bp, Artificial Sequence
  chemically synthesized
caataaaatgtacacagcgt

SEQ ID NO: 38910 - DNA, 20 bp, Artificial Sequence
  chemically synthesized
ataaaatgtacacagcgtaa

SEQ ID NO: 38911 - DNA, 20 bp, Artificial Sequence
  chemically synthesized
tactattttaaccatttttg

SEQ ID NO: 38912 - DNA, 20 bp, Artificial Sequence
  chemically synthesized
actattttaaccatttttgc

SEQ ID NO: 38913 - DNA, 20 bp, Artificial Sequence
  chemically synthesized
ctattttaaccatttttgca

SEQ ID NO: 38914 - DNA, 20 bp, Artificial Sequence
  chemically synthesized
catttttgcagggtaccacc

SEQ ID NO: 38915 - DNA, 20 bp, Artificial Sequence
  chemically synthesized
ttttgcagggtaccaccaag

SEQ ID NO: 38916 - DNA, 20 bp, Artificial Sequence
  chemically synthesized
gggtaccaccaagtggcatt

SEQ ID NO: 38917 - DNA, 20 bp, Artificial Sequence
  chemically synthesized
agtggcatttagtacattca

SEQ ID NO: 38918 - DNA, 20 bp, Artificial Sequence
  chemically synthesized
ggcatttagtacattcacag

SEQ ID NO: 38919 - DNA, 20 bp, Artificial Sequence
  chemically synthesized
tgcaaccatcatcatatttc

SEQ ID NO: 38920 - DNA, 20 bp, Artificial Sequence
  chemically synthesized
gaatattttcctcatcccca

SEQ ID NO: 38921 - DNA, 20 bp, Artificial Sequence
  chemically synthesized
aatattttcctcatccccaa

SEQ ID NO: 38922 - DNA, 20 bp, Artificial Sequence
  chemically synthesized
gaaacctcatgctcattaat

SEQ ID NO: 38923 - DNA, 20 bp, Artificial Sequence
  chemically synthesized
acctcatgctcattaatcag

SEQ ID NO: 38924 - DNA, 20 bp, Artificial Sequence
  chemically synthesized
gtagctctcctttaaaatat

SEQ ID NO: 38925 - DNA, 20 bp, Artificial Sequence
  chemically synthesized
cctttaaaatattagttatg

SEQ ID NO: 38926 - DNA, 20 bp, Artificial Sequence
  chemically synthesized
aatattagttatgaagatca

SEQ ID NO: 38927 - DNA, 20 bp, Artificial Sequence
  chemically synthesized
aaaactcattatgtaatgtt

SEQ ID NO: 38928 - DNA, 20 bp, Artificial Sequence
  chemically synthesized
gtaatgttgagtgaaaaaat

SEQ ID NO: 38929 - DNA, 20 bp, Artificial Sequence
  chemically synthesized
taatgttgagtgaaaaaatc

SEQ ID NO: 38930 - DNA, 20 bp, Artificial Sequence
  chemically synthesized
aatgttgagtgaaaaaatca

SEQ ID NO: 38931 - DNA, 20 bp, Artificial Sequence
  chemically synthesized
attttgtgatatgatgtaat

SEQ ID NO: 38932 - DNA, 20 bp, Artificial Sequence
  chemically synthesized
tgatatgatgtaattagtga

SEQ ID NO: 38933 - DNA, 20 bp, Artificial Sequence
  chemically synthesized
tatgatgtaattagtgaaag

SEQ ID NO: 38934 - DNA, 20 bp, Artificial Sequence
  chemically synthesized
tagtgaaagaagcatacaaa

SEQ ID NO: 38935 - DNA, 20 bp, Artificial Sequence
  chemically synthesized
gtctgaaaatataaaaacaa

SEQ ID NO: 38936 - DNA, 20 bp, Artificial Sequence
  chemically synthesized
acaatagcaattgcatttct

SEQ ID NO: 38937 - DNA, 20 bp, Artificial Sequence
  chemically synthesized
catttaaacattattcttta

SEQ ID NO: 38938 - DNA, 20 bp, Artificial Sequence
  chemically synthesized
attattctttatggttttaa

SEQ ID NO: 38939 - DNA, 20 bp, Artificial Sequence
  chemically synthesized
tctttatggttttaaaagca

SEQ ID NO: 38940 - DNA, 20 bp, Artificial Sequence
  chemically synthesized
tggttttaaaagcaaagaaa

SEQ ID NO: 38941 - DNA, 20 bp, Artificial Sequence
  chemically synthesized
ggttttaaaagcaaagaaaa

SEQ ID NO: 38942 - DNA, 20 bp, Artificial Sequence
  chemically synthesized
taaaagcaaagaaaaaggta

SEQ ID NO: 38943 - DNA, 20 bp, Artificial Sequence
  chemically synthesized
agaaacaacaaccaaccgca

SEQ ID NO: 38944 - DNA, 20 bp, Artificial Sequence
  chemically synthesized
aaccgcaaagcaccatgaca

SEQ ID NO: 38945 - DNA, 20 bp, Artificial Sequence
  chemically synthesized
caaagcaccatgacaaagct

SEQ ID NO: 38946 - DNA, 20 bp, Artificial Sequence
  chemically synthesized
aaagctcagattgttaaatc

SEQ ID NO: 38947 - DNA, 20 bp, Artificial Sequence
  chemically synthesized
aagctcagattgttaaatcc

SEQ ID NO: 38948 - DNA, 20 bp, Artificial Sequence
  chemically synthesized
gattgttaaatccaggtttt

SEQ ID NO: 38949 - DNA, 20 bp, Artificial Sequence
  chemically synthesized
aaatccaggtttttggaaca

SEQ ID NO: 38950 - DNA, 20 bp, Artificial Sequence
  chemically synthesized
tatatgacgtttacactctc

SEQ ID NO: 38951 - DNA, 20 bp, Artificial Sequence
  chemically synthesized
atatgacgtttacactctcc

SEQ ID NO: 38952 - DNA, 20 bp, Artificial Sequence
  chemically synthesized
tatgacgtttacactctcca

SEQ ID NO: 38953 - DNA, 20 bp, Artificial Sequence
  chemically synthesized
cgtttacactctccagggtt

SEQ ID NO: 38954 - DNA, 20 bp, Artificial Sequence
  chemically synthesized
tttacactctccagggttca

SEQ ID NO: 38955 - DNA, 20 bp, Artificial Sequence
  chemically synthesized
tacactctccagggttcaga

SEQ ID NO: 38956 - DNA, 20 bp, Artificial Sequence
  chemically synthesized
tctccagggttcagagagtc

SEQ ID NO: 38957 - DNA, 20 bp, Artificial Sequence
  chemically synthesized
ccagggttcagagagtctgg

SEQ ID NO: 38958 - DNA, 20 bp, Artificial Sequence
  chemically synthesized
ttcagagagtctggcagcat

SEQ ID NO: 38959 - DNA, 20 bp, Artificial Sequence
  chemically synthesized
tcagagagtctggcagcatt

SEQ ID NO: 38960 - DNA, 20 bp, Artificial Sequence
  chemically synthesized
agagagtctggcagcattgg

SEQ ID NO: 38961 - DNA, 20 bp, Artificial Sequence
  chemically synthesized
gggagctgccttgtgttcta

SEQ ID NO: 38962 - DNA, 20 bp, Artificial Sequence
  chemically synthesized
ccttgtgttctacagcctca

SEQ ID NO: 38963 - DNA, 20 bp, Artificial Sequence
  chemically synthesized
gtgttctacagcctcacgga

SEQ ID NO: 38964 - DNA, 20 bp, Artificial Sequence
  chemically synthesized
tctacagcctcacggacaga

SEQ ID NO: 38965 - DNA, 20 bp, Artificial Sequence
  chemically synthesized
ctacagcctcacggacagac

SEQ ID NO: 38966 - DNA, 20 bp, Artificial Sequence
  chemically synthesized
acagcctcacggacagacag

SEQ ID NO: 38967 - DNA, 20 bp, Artificial Sequence
  chemically synthesized
cagcctcacggacagacagg

SEQ ID NO: 38968 - DNA, 20 bp, Artificial Sequence
  chemically synthesized
tcaccactgctctgttcttc

SEQ ID NO: 38969 - DNA, 20 bp, Artificial Sequence
  chemically synthesized
accactgctctgttcttctg

SEQ ID NO: 38970 - DNA, 20 bp, Artificial Sequence
  chemically synthesized
gtttccttgtgaacatgttg

SEQ ID NO: 38971 - DNA, 20 bp, Artificial Sequence
  chemically synthesized
ttgtgaacatgttgtggacg

SEQ ID NO: 38972 - DNA, 20 bp, Artificial Sequence
  chemically synthesized
ttctttcatctttttaaaca

SEQ ID NO: 38973 - DNA, 20 bp, Artificial Sequence
  chemically synthesized
tctttcatctttttaaacac

SEQ ID NO: 38974 - DNA, 20 bp, Artificial Sequence
  chemically synthesized
tttttaaacacaggtacctt

SEQ ID NO: 38975 - DNA, 20 bp, Artificial Sequence
  chemically synthesized
ttttaaacacaggtaccttt

SEQ ID NO: 38976 - DNA, 20 bp, Artificial Sequence
  chemically synthesized
tttaaacacaggtacctttg

SEQ ID NO: 38977 - DNA, 20 bp, Artificial Sequence
  chemically synthesized
aacacaggtacctttggggc

SEQ ID NO: 38978 - DNA, 20 bp, Artificial Sequence
  chemically synthesized
cctttggggctggctttctc

SEQ ID NO: 38979 - DNA, 20 bp, Artificial Sequence
  chemically synthesized
ctttggggctggctttctca

SEQ ID NO: 38980 - DNA, 20 bp, Artificial Sequence
  chemically synthesized
tggggctggctttctcaagg

SEQ ID NO: 38981 - DNA, 20 bp, Artificial Sequence
  chemically synthesized
ctggctttctcaaggaagcc

SEQ ID NO: 38982 - DNA, 20 bp, Artificial Sequence
  chemically synthesized
aagcccagctccctgtgatt

SEQ ID NO: 38983 - DNA, 20 bp, Artificial Sequence
  chemically synthesized
gctccctgtgattgagaatg

SEQ ID NO: 38984 - DNA, 20 bp, Artificial Sequence
  chemically synthesized
atgaagtgtgcaatcgctat

SEQ ID NO: 38985 - DNA, 20 bp, Artificial Sequence
  chemically synthesized
aatcgctatgagtttctgaa

SEQ ID NO: 38986 - DNA, 20 bp, Artificial Sequence
  chemically synthesized
cgctatgagtttctgaatgg

SEQ ID NO: 38987 - DNA, 20 bp, Artificial Sequence
  chemically synthesized
ctatgagtttctgaatggaa

SEQ ID NO: 38988 - DNA, 20 bp, Artificial Sequence
  chemically synthesized
atggaagagtcaaatccact

SEQ ID NO: 38989 - DNA, 20 bp, Artificial Sequence
  chemically synthesized
aaatccactgagctctgtgc

SEQ ID NO: 38990 - DNA, 20 bp, Artificial Sequence
  chemically synthesized
aatccactgagctctgtgct

SEQ ID NO: 38991 - DNA, 20 bp, Artificial Sequence
  chemically synthesized
tgagctctgtgctgggcatt

SEQ ID NO: 38992 - DNA, 20 bp, Artificial Sequence
  chemically synthesized
ctctgtgctgggcatttggc

SEQ ID NO: 38993 - DNA, 20 bp, Artificial Sequence
  chemically synthesized
ctgtgctgggcatttggctg

SEQ ID NO: 38994 - DNA, 20 bp, Artificial Sequence
  chemically synthesized
tgtgctgggcatttggctgg

SEQ ID NO: 38995 - DNA, 20 bp, Artificial Sequence
  chemically synthesized
catttggctggaggcattga

SEQ ID NO: 38996 - DNA, 20 bp, Artificial Sequence
  chemically synthesized
ctggaggcattgacagttgc

SEQ ID NO: 38997 - DNA, 20 bp, Artificial Sequence
  chemically synthesized
tggaggcattgacagttgca

SEQ ID NO: 38998 - DNA, 20 bp, Artificial Sequence
  chemically synthesized
ggcattgacagttgcaaggt

SEQ ID NO: 38999 - DNA, 20 bp, Artificial Sequence
  chemically synthesized
tgacagttgcaaggtaagaa

SEQ ID NO: 39000 - DNA, 20 bp, Artificial Sequence
  chemically synthesized
ttgcaaggtaagaaaagatc

SEQ ID NO: 39001 - DNA, 20 bp, Artificial Sequence
  chemically synthesized
gcaaggtaagaaaagatcaa

SEQ ID NO: 39002 - DNA, 20 bp, Artificial Sequence
  chemically synthesized
aagaaaagatcaagagacca

SEQ ID NO: 39003 - DNA, 20 bp, Artificial Sequence
  chemically synthesized
aaagatcaagagaccaaagt

SEQ ID NO: 39004 - DNA, 20 bp, Artificial Sequence
  chemically synthesized
agtcttgtgctctcctgtct

SEQ ID NO: 39005 - DNA, 20 bp, Artificial Sequence
  chemically synthesized
gtgctctcctgtctcagtct

SEQ ID NO: 39006 - DNA, 20 bp, Artificial Sequence
  chemically synthesized
ctgtctcagtctcagtccct

SEQ ID NO: 39007 - DNA, 20 bp, Artificial Sequence
  chemically synthesized
agtctcagtcccttagactt

SEQ ID NO: 39008 - DNA, 20 bp, Artificial Sequence
  chemically synthesized
tcccttagacttgagtccca

SEQ ID NO: 39009 - DNA, 20 bp, Artificial Sequence
  chemically synthesized
cttagacttgagtcccaaag

SEQ ID NO: 39010 - DNA, 20 bp, Artificial Sequence
  chemically synthesized
agtcccaaagtagcgaattc

SEQ ID NO: 39011 - DNA, 20 bp, Artificial Sequence
  chemically synthesized
cccaaagtagcgaattcaag

SEQ ID NO: 39012 - DNA, 20 bp, Artificial Sequence
  chemically synthesized
ccaaagtagcgaattcaagt

SEQ ID NO: 39013 - DNA, 20 bp, Artificial Sequence
  chemically synthesized
ttcaagtaggatttaatcaa

SEQ ID NO: 39014 - DNA, 20 bp, Artificial Sequence
  chemically synthesized
aagtaggatttaatcaatgg

SEQ ID NO: 39015 - DNA, 20 bp, Artificial Sequence
  chemically synthesized
atttaatcaatggaagaccc

SEQ ID NO: 39016 - DNA, 20 bp, Artificial Sequence
  chemically synthesized
tcaatggaagaccccagtct

SEQ ID NO: 39017 - DNA, 20 bp, Artificial Sequence
  chemically synthesized
accccagtctaagtgttgct

SEQ ID NO: 39018 - DNA, 20 bp, Artificial Sequence
  chemically synthesized
agtgttgctcagaaactccc

SEQ ID NO: 39019 - DNA, 20 bp, Artificial Sequence
  chemically synthesized
atctgtcccaaatgtatatt

SEQ ID NO: 39020 - DNA, 20 bp, Artificial Sequence
  chemically synthesized
aatgtatattcagatcatcc

SEQ ID NO: 39021 - DNA, 20 bp, Artificial Sequence
  chemically synthesized
atgtatattcagatcatcca

SEQ ID NO: 39022 - DNA, 20 bp, Artificial Sequence
  chemically synthesized
tgtatattcagatcatccaa

SEQ ID NO: 39023 - DNA, 20 bp, Artificial Sequence
  chemically synthesized
gtatattcagatcatccaag

SEQ ID NO: 39024 - DNA, 20 bp, Artificial Sequence
  chemically synthesized
gatcatccaaggggacttct

SEQ ID NO: 39025 - DNA, 20 bp, Artificial Sequence
  chemically synthesized
atcatccaaggggacttctt

SEQ ID NO: 39026 - DNA, 20 bp, Artificial Sequence
  chemically synthesized
tcatccaaggggacttcttg

SEQ ID NO: 39027 - DNA, 20 bp, Artificial Sequence
  chemically synthesized
aaggggacttcttggggctt

SEQ ID NO: 39028 - DNA, 20 bp, Artificial Sequence
  chemically synthesized
acttcttggggcttgagttc

SEQ ID NO: 39029 - DNA, 20 bp, Artificial Sequence
  chemically synthesized
ttggggcttgagttccagat

SEQ ID NO: 39030 - DNA, 20 bp, Artificial Sequence
  chemically synthesized
gggcttgagttccagatcag

SEQ ID NO: 39031 - DNA, 20 bp, Artificial Sequence
  chemically synthesized
ttgagttccagatcagcagc

SEQ ID NO: 39032 - DNA, 20 bp, Artificial Sequence
  chemically synthesized
tgagttccagatcagcagca

SEQ ID NO: 39033 - DNA, 20 bp, Artificial Sequence
  chemically synthesized
gagttccagatcagcagcaa

SEQ ID NO: 39034 - DNA, 20 bp, Artificial Sequence
  chemically synthesized
gttccagatcagcagcaagg

SEQ ID NO: 39035 - DNA, 20 bp, Artificial Sequence
  chemically synthesized
atcagcagcaagggagccat

SEQ ID NO: 39036 - DNA, 20 bp, Artificial Sequence
  chemically synthesized
cataagtgccataactacct

SEQ ID NO: 39037 - DNA, 20 bp, Artificial Sequence
  chemically synthesized
cctcagaccactcaccctcc

SEQ ID NO: 39038 - DNA, 20 bp, Artificial Sequence
  chemically synthesized
ctcagaccactcaccctcct

SEQ ID NO: 39039 - DNA, 20 bp, Artificial Sequence
  chemically synthesized
tcagaccactcaccctcctg

SEQ ID NO: 39040 - DNA, 20 bp, Artificial Sequence
  chemically synthesized
ctcaccctcctggggtgtcc

SEQ ID NO: 39041 - DNA, 20 bp, Artificial Sequence
  chemically synthesized
accctcctggggtgtcccgg

SEQ ID NO: 39042 - DNA, 20 bp, Artificial Sequence
  chemically synthesized
tcctggggtgtcccggtggc

SEQ ID NO: 39043 - DNA, 20 bp, Artificial Sequence
  chemically synthesized
cctggggtgtcccggtggcc

SEQ ID NO: 39044 - DNA, 20 bp, Artificial Sequence
  chemically synthesized
ctggggtgtcccggtggcca

SEQ ID NO: 39045 - DNA, 20 bp, Artificial Sequence
  chemically synthesized
gtcccggtggccagggacta

SEQ ID NO: 39046 - DNA, 20 bp, Artificial Sequence
  chemically synthesized
ccggtggccagggactaaag

SEQ ID NO: 39047 - DNA, 20 bp, Artificial Sequence
  chemically synthesized
gactaaagtggtgatttttc

SEQ ID NO: 39048 - DNA, 20 bp, Artificial Sequence
  chemically synthesized
taaagtggtgatttttctgg

SEQ ID NO: 39049 - DNA, 20 bp, Artificial Sequence
  chemically synthesized
aaagtggtgatttttctggt

SEQ ID NO: 39050 - DNA, 20 bp, Artificial Sequence
  chemically synthesized
aagtggtgatttttctggta

SEQ ID NO: 39051 - DNA, 20 bp, Artificial Sequence
  chemically synthesized
tggtgatttttctggtaggg

SEQ ID NO: 39052 - DNA, 20 bp, Artificial Sequence
  chemically synthesized
ggtgatttttctggtaggga

SEQ ID NO: 39053 - DNA, 20 bp, Artificial Sequence
  chemically synthesized
tgatttttctggtagggaag

SEQ ID NO: 39054 - DNA, 20 bp, Artificial Sequence
  chemically synthesized
gatttttctggtagggaagg

SEQ ID NO: 39055 - DNA, 20 bp, Artificial Sequence
  chemically synthesized
ttttctggtagggaaggagg

SEQ ID NO: 39056 - DNA, 20 bp, Artificial Sequence
  chemically synthesized
ttctggtagggaaggaggta

SEQ ID NO: 39057 - DNA, 20 bp, Artificial Sequence
  chemically synthesized
tctggtagggaaggaggtag

SEQ ID NO: 39058 - DNA, 20 bp, Artificial Sequence
  chemically synthesized
ctggtagggaaggaggtaga

SEQ ID NO: 39059 - DNA, 20 bp, Artificial Sequence
  chemically synthesized
agggaaggaggtagagggta

SEQ ID NO: 39060 - DNA, 20 bp, Artificial Sequence
  chemically synthesized
gggaaggaggtagagggtac

SEQ ID NO: 39061 - DNA, 20 bp, Artificial Sequence
  chemically synthesized
aggaggtagagggtacagga

SEQ ID NO: 39062 - DNA, 20 bp, Artificial Sequence
  chemically synthesized
gaggtagagggtacaggaca

SEQ ID NO: 39063 - DNA, 20 bp, Artificial Sequence
  chemically synthesized
actaactgcacacaatatct

SEQ ID NO: 39064 - DNA, 20 bp, Artificial Sequence
  chemically synthesized
ctgcacacaatatctgagac

SEQ ID NO: 39065 - DNA, 20 bp, Artificial Sequence
  chemically synthesized
gcacacaatatctgagactg

SEQ ID NO: 39066 - DNA, 20 bp, Artificial Sequence
  chemically synthesized
caatatctgagactggagct

SEQ ID NO: 39067 - DNA, 20 bp, Artificial Sequence
  chemically synthesized
gctcagatattgctgatgat

SEQ ID NO: 39068 - DNA, 20 bp, Artificial Sequence
  chemically synthesized
tcagatattgctgatgatca

SEQ ID NO: 39069 - DNA, 20 bp, Artificial Sequence
  chemically synthesized
atattgctgatgatcagagt

SEQ ID NO: 39070 - DNA, 20 bp, Artificial Sequence
  chemically synthesized
ctccccaattgatttacaac

SEQ ID NO: 39071 - DNA, 20 bp, Artificial Sequence
  chemically synthesized
tccccaattgatttacaact

SEQ ID NO: 39072 - DNA, 20 bp, Artificial Sequence
  chemically synthesized
ccccaattgatttacaactg

SEQ ID NO: 39073 - DNA, 20 bp, Artificial Sequence
  chemically synthesized
attgatttacaactggggct

SEQ ID NO: 39074 - DNA, 20 bp, Artificial Sequence
  chemically synthesized
ggcttggatactgttttaaa

SEQ ID NO: 39075 - DNA, 20 bp, Artificial Sequence
  chemically synthesized
gcttggatactgttttaaac

SEQ ID NO: 39076 - DNA, 20 bp, Artificial Sequence
  chemically synthesized
ttggatactgttttaaacgg

SEQ ID NO: 39077 - DNA, 20 bp, Artificial Sequence
  chemically synthesized
tggatactgttttaaacggg

SEQ ID NO: 39078 - DNA, 20 bp, Artificial Sequence
  chemically synthesized
gatactgttttaaacgggag

SEQ ID NO: 39079 - DNA, 20 bp, Artificial Sequence
  chemically synthesized
aaccactgacgtgactacac

SEQ ID NO: 39080 - DNA, 20 bp, Artificial Sequence
  chemically synthesized
ccactgacgtgactacacta

SEQ ID NO: 39081 - DNA, 20 bp, Artificial Sequence
  chemically synthesized
tgacgtgactacactagaga

SEQ ID NO: 39082 - DNA, 20 bp, Artificial Sequence
  chemically synthesized
ccactcttgctttacttcat

SEQ ID NO: 39083 - DNA, 20 bp, Artificial Sequence
  chemically synthesized
cttcatgagaacgaaaatgt

SEQ ID NO: 39084 - DNA, 20 bp, Artificial Sequence
  chemically synthesized
ttgcaccatgaattcatttg

SEQ ID NO: 39085 - DNA, 20 bp, Artificial Sequence
  chemically synthesized
accatgaattcatttgcgga

SEQ ID NO: 39086 - DNA, 20 bp, Artificial Sequence
  chemically synthesized
ttattttattttattttatt

SEQ ID NO: 39087 - DNA, 20 bp, Artificial Sequence
  chemically synthesized
ttttattgagactctcaccc

SEQ ID NO: 39088 - DNA, 20 bp, Artificial Sequence
  chemically synthesized
tgagactctcaccccggttg

SEQ ID NO: 39089 - DNA, 20 bp, Artificial Sequence
  chemically synthesized
gaagtgcactgacgtgattt

SEQ ID NO: 39090 - DNA, 20 bp, Artificial Sequence
  chemically synthesized
tcactgcaacttccacctcc

SEQ ID NO: 39091 - DNA, 20 bp, Artificial Sequence
  chemically synthesized
cactgcaacttccacctcct

SEQ ID NO: 39092 - DNA, 20 bp, Artificial Sequence
  chemically synthesized
aacttccacctcctgggttc

SEQ ID NO: 39093 - DNA, 20 bp, Artificial Sequence
  chemically synthesized
ctgggttcaagtgaatactc

SEQ ID NO: 39094 - DNA, 20 bp, Artificial Sequence
  chemically synthesized
agtgaatactccagcctccc

SEQ ID NO: 39095 - DNA, 20 bp, Artificial Sequence
  chemically synthesized
gaatactccagcctccctag

SEQ ID NO: 39096 - DNA, 20 bp, Artificial Sequence
  chemically synthesized
actccagcctccctagtagc

SEQ ID NO: 39097 - DNA, 20 bp, Artificial Sequence
  chemically synthesized
ctccagcctccctagtagct

SEQ ID NO: 39098 - DNA, 20 bp, Artificial Sequence
  chemically synthesized
ctccctagtagctgggatta

SEQ ID NO: 39099 - DNA, 20 bp, Artificial Sequence
  chemically synthesized
tccctagtagctgggattac

SEQ ID NO: 39100 - DNA, 20 bp, Artificial Sequence
  chemically synthesized
caggtgcccaccaccacgcc

SEQ ID NO: 39101 - DNA, 20 bp, Artificial Sequence
  chemically synthesized
ctggctaatttttgtatttt

SEQ ID NO: 39102 - DNA, 20 bp, Artificial Sequence
  chemically synthesized
gctaatttttgtatttttag

SEQ ID NO: 39103 - DNA, 20 bp, Artificial Sequence
  chemically synthesized
taatttttgtatttttagta

SEQ ID NO: 39104 - DNA, 20 bp, Artificial Sequence
  chemically synthesized
ttttgtatttttagtagaga

SEQ ID NO: 39105 - DNA, 20 bp, Artificial Sequence
  chemically synthesized
tttgtatttttagtagagat

SEQ ID NO: 39106 - DNA, 20 bp, Artificial Sequence
  chemically synthesized
ttgtatttttagtagagatg

SEQ ID NO: 39107 - DNA, 20 bp, Artificial Sequence
  chemically synthesized
gagatggggtttcaccacat

SEQ ID NO: 39108 - DNA, 20 bp, Artificial Sequence
  chemically synthesized
ggggtttcaccacattggcc

SEQ ID NO: 39109 - DNA, 20 bp, Artificial Sequence
  chemically synthesized
tttcaccacattggcctggc

SEQ ID NO: 39110 - DNA, 20 bp, Artificial Sequence
  chemically synthesized
accttgtgatccacctgtct

SEQ ID NO: 39111 - DNA, 20 bp, Artificial Sequence
  chemically synthesized
ccacctgtcttggcctccca

SEQ ID NO: 39112 - DNA, 20 bp, Artificial Sequence
  chemically synthesized
gtcttggcctcccaaagtgc

SEQ ID NO: 39113 - DNA, 20 bp, Artificial Sequence
  chemically synthesized
tcttggcctcccaaagtgct

SEQ ID NO: 39114 - DNA, 20 bp, Artificial Sequence
  chemically synthesized
ctcccaaagtgctgggatta

SEQ ID NO: 39115 - DNA, 20 bp, Artificial Sequence
  chemically synthesized
cccaaagtgctgggattaca

SEQ ID NO: 39116 - DNA, 20 bp, Artificial Sequence
  chemically synthesized
agtgctgggattacagagtt

SEQ ID NO: 39117 - DNA, 20 bp, Artificial Sequence
  chemically synthesized
aaatatttatttatttattt

SEQ ID NO: 39118 - DNA, 20 bp, Artificial Sequence
  chemically synthesized
tttatttaagccacaactac

SEQ ID NO: 39119 - DNA, 20 bp, Artificial Sequence
  chemically synthesized
ttaagccacaactactagaa

SEQ ID NO: 39120 - DNA, 20 bp, Artificial Sequence
  chemically synthesized
taagccacaactactagaat

SEQ ID NO: 39121 - DNA, 20 bp, Artificial Sequence
  chemically synthesized
gccacaactactagaatagg

SEQ ID NO: 39122 - DNA, 20 bp, Artificial Sequence
  chemically synthesized
ccacaactactagaatagga

SEQ ID NO: 39123 - DNA, 20 bp, Artificial Sequence
  chemically synthesized
gatattttattaattttatt

SEQ ID NO: 39124 - DNA, 20 bp, Artificial Sequence
  chemically synthesized
attatttttttttctttcct

SEQ ID NO: 39125 - DNA, 20 bp, Artificial Sequence
  chemically synthesized
gacattcttgctctgtcacc

SEQ ID NO: 39126 - DNA, 20 bp, Artificial Sequence
  chemically synthesized
acattcttgctctgtcaccc

SEQ ID NO: 39127 - DNA, 20 bp, Artificial Sequence
  chemically synthesized
tcttgctctgtcacccaggc

SEQ ID NO: 39128 - DNA, 20 bp, Artificial Sequence
  chemically synthesized
ttgctctgtcacccaggctg

SEQ ID NO: 39129 - DNA, 20 bp, Artificial Sequence
  chemically synthesized
ctgtcacccaggctggagtg

SEQ ID NO: 39130 - DNA, 20 bp, Artificial Sequence
  chemically synthesized
tcacccaggctggagtgcag

SEQ ID NO: 39131 - DNA, 20 bp, Artificial Sequence
  chemically synthesized
ggagtgcagtggcacattct

SEQ ID NO: 39132 - DNA, 20 bp, Artificial Sequence
  chemically synthesized
aacctccatctcctgtgttc

SEQ ID NO: 39133 - DNA, 20 bp, Artificial Sequence
  chemically synthesized
ctcctgtgttcaagcaattc

SEQ ID NO: 39134 - DNA, 20 bp, Artificial Sequence
  chemically synthesized
ttcaagcaattctagtgcct

SEQ ID NO: 39135 - DNA, 20 bp, Artificial Sequence
  chemically synthesized
ttctagtgcctcagcctact

SEQ ID NO: 39136 - DNA, 20 bp, Artificial Sequence
  chemically synthesized
tagtgcctcagcctacttag

SEQ ID NO: 39137 - DNA, 20 bp, Artificial Sequence
  chemically synthesized
gcctcagcctacttagtagc

SEQ ID NO: 39138 - DNA, 20 bp, Artificial Sequence
  chemically synthesized
cctcagcctacttagtagct

SEQ ID NO: 39139 - DNA, 20 bp, Artificial Sequence
  chemically synthesized
tacttagtagctgggatgac

SEQ ID NO: 39140 - DNA, 20 bp, Artificial Sequence
  chemically synthesized
ctggcatgtgcctccacacc

SEQ ID NO: 39141 - DNA, 20 bp, Artificial Sequence
  chemically synthesized
gctaatttttgtattttttg

SEQ ID NO: 39142 - DNA, 20 bp, Artificial Sequence
  chemically synthesized
taatttttgtattttttgta

SEQ ID NO: 39143 - DNA, 20 bp, Artificial Sequence
  chemically synthesized
ttttgtattttttgtagaga

SEQ ID NO: 39144 - DNA, 20 bp, Artificial Sequence
  chemically synthesized
tttgtattttttgtagagac

SEQ ID NO: 39145 - DNA, 20 bp, Artificial Sequence
  chemically synthesized
ttgtattttttgtagagaca

SEQ ID NO: 39146 - DNA, 20 bp, Artificial Sequence
  chemically synthesized
tttttgtagagacagggttt

SEQ ID NO: 39147 - DNA, 20 bp, Artificial Sequence
  chemically synthesized
cagggttttggcatgttgcc

SEQ ID NO: 39148 - DNA, 20 bp, Artificial Sequence
  chemically synthesized
agggttttggcatgttgccc

SEQ ID NO: 39149 - DNA, 20 bp, Artificial Sequence
  chemically synthesized
ccaggcttgtctcaaactcc

SEQ ID NO: 39150 - DNA, 20 bp, Artificial Sequence
  chemically synthesized
ttgtctcaaactcctggcct

SEQ ID NO: 39151 - DNA, 20 bp, Artificial Sequence
  chemically synthesized
tgtctcaaactcctggcctc

SEQ ID NO: 39152 - DNA, 20 bp, Artificial Sequence
  chemically synthesized
ctcaggtgatccatctgccg

SEQ ID NO: 39153 - DNA, 20 bp, Artificial Sequence
  chemically synthesized
gccgtggcctcccaaaatgc

SEQ ID NO: 39154 - DNA, 20 bp, Artificial Sequence
  chemically synthesized
ccgtggcctcccaaaatgct

SEQ ID NO: 39155 - DNA, 20 bp, Artificial Sequence
  chemically synthesized
ctcccaaaatgctgggatta

SEQ ID NO: 39156 - DNA, 20 bp, Artificial Sequence
  chemically synthesized
tcccaaaatgctgggattat

SEQ ID NO: 39157 - DNA, 20 bp, Artificial Sequence
  chemically synthesized
aatgctgggattataggcat

SEQ ID NO: 39158 - DNA, 20 bp, Artificial Sequence
  chemically synthesized
catgagccaccaccccctcc

SEQ ID NO: 39159 - DNA, 20 bp, Artificial Sequence
  chemically synthesized
gagccaccaccccctcctgg

SEQ ID NO: 39160 - DNA, 20 bp, Artificial Sequence
  chemically synthesized
agccaccaccccctcctgga

SEQ ID NO: 39161 - DNA, 20 bp, Artificial Sequence
  chemically synthesized
tataacataatttataatta

SEQ ID NO: 39162 - DNA, 20 bp, Artificial Sequence
  chemically synthesized
tataattacagaaaacatgt

SEQ ID NO: 39163 - DNA, 20 bp, Artificial Sequence
  chemically synthesized
cagaaaacatgtgagttcac

SEQ ID NO: 39164 - DNA, 20 bp, Artificial Sequence
  chemically synthesized
agaaaacatgtgagttcact

SEQ ID NO: 39165 - DNA, 20 bp, Artificial Sequence
  chemically synthesized
ctaggaataaataaattttg

SEQ ID NO: 39166 - DNA, 20 bp, Artificial Sequence
  chemically synthesized
ataaattttgaagataataa

SEQ ID NO: 39167 - DNA, 20 bp, Artificial Sequence
  chemically synthesized
tttcacttatgttgtcattt

SEQ ID NO: 39168 - DNA, 20 bp, Artificial Sequence
  chemically synthesized
cttatgttgtcatttcggca

SEQ ID NO: 39169 - DNA, 20 bp, Artificial Sequence
  chemically synthesized
gttgtcatttcggcacagtt

SEQ ID NO: 39170 - DNA, 20 bp, Artificial Sequence
  chemically synthesized
catttcggcacagtttggta

SEQ ID NO: 39171 - DNA, 20 bp, Artificial Sequence
  chemically synthesized
atttcggcacagtttggtat

SEQ ID NO: 39172 - DNA, 20 bp, Artificial Sequence
  chemically synthesized
gcacagtttggtataggatg

SEQ ID NO: 39173 - DNA, 20 bp, Artificial Sequence
  chemically synthesized
acagtttggtataggatgtg

SEQ ID NO: 39174 - DNA, 20 bp, Artificial Sequence
  chemically synthesized
gagatgttaacatttatacc

SEQ ID NO: 39175 - DNA, 20 bp, Artificial Sequence
  chemically synthesized
acctagcttgctcgtaaact

SEQ ID NO: 39176 - DNA, 20 bp, Artificial Sequence
  chemically synthesized
gctcgtaaactaagacctga

SEQ ID NO: 39177 - DNA, 20 bp, Artificial Sequence
  chemically synthesized
ctcgtaaactaagacctgaa

SEQ ID NO: 39178 - DNA, 20 bp, Artificial Sequence
  chemically synthesized
tcgtaaactaagacctgaaa

SEQ ID NO: 39179 - DNA, 20 bp, Artificial Sequence
  chemically synthesized
cctgaaagggttgtgtctat

SEQ ID NO: 39180 - DNA, 20 bp, Artificial Sequence
  chemically synthesized
gtgtctatcagctgcacccc

SEQ ID NO: 39181 - DNA, 20 bp, Artificial Sequence
  chemically synthesized
tgtctatcagctgcacccct

SEQ ID NO: 39182 - DNA, 20 bp, Artificial Sequence
  chemically synthesized
ctatcagctgcacccctggg

SEQ ID NO: 39183 - DNA, 20 bp, Artificial Sequence
  chemically synthesized
cctgggtagcgacacaacct

SEQ ID NO: 39184 - DNA, 20 bp, Artificial Sequence
  chemically synthesized
ctgggtagcgacacaacctc

SEQ ID NO: 39185 - DNA, 20 bp, Artificial Sequence
  chemically synthesized
ggtagcgacacaacctcggg

SEQ ID NO: 39186 - DNA, 20 bp, Artificial Sequence
  chemically synthesized
gtagcgacacaacctcggga

SEQ ID NO: 39187 - DNA, 20 bp, Artificial Sequence
  chemically synthesized
acacaacctcgggaaggcct

SEQ ID NO: 39188 - DNA, 20 bp, Artificial Sequence
  chemically synthesized
gcctcagccccctcctcgta

SEQ ID NO: 39189 - DNA, 20 bp, Artificial Sequence
  chemically synthesized
cctcgtacagcactgcctgt

SEQ ID NO: 39190 - DNA, 20 bp, Artificial Sequence
  chemically synthesized
gtacagcactgcctgttgga

SEQ ID NO: 39191 - DNA, 20 bp, Artificial Sequence
  chemically synthesized
cactgcctgttggaaagctt

SEQ ID NO: 39192 - DNA, 20 bp, Artificial Sequence
  chemically synthesized
actgcctgttggaaagcttg

SEQ ID NO: 39193 - DNA, 20 bp, Artificial Sequence
  chemically synthesized
ctgcctgttggaaagcttga

SEQ ID NO: 39194 - DNA, 20 bp, Artificial Sequence
  chemically synthesized
gcctgttggaaagcttgagg

SEQ ID NO: 39195 - DNA, 20 bp, Artificial Sequence
  chemically synthesized
cctgttggaaagcttgaggg

SEQ ID NO: 39196 - DNA, 20 bp, Artificial Sequence
  chemically synthesized
ggaaagcttgagggaggcta

SEQ ID NO: 39197 - DNA, 20 bp, Artificial Sequence
  chemically synthesized
tgagggaggctatggatgtg

SEQ ID NO: 39198 - DNA, 20 bp, Artificial Sequence
  chemically synthesized
ggctatggatgtgcagcact

SEQ ID NO: 39199 - DNA, 20 bp, Artificial Sequence
  chemically synthesized
tatggatgtgcagcacttgg

SEQ ID NO: 39200 - DNA, 20 bp, Artificial Sequence
  chemically synthesized
tggatgtgcagcacttggca

SEQ ID NO: 39201 - DNA, 20 bp, Artificial Sequence
  chemically synthesized
ggatgtgcagcacttggcag

SEQ ID NO: 39202 - DNA, 20 bp, Artificial Sequence
  chemically synthesized
gatgtgcagcacttggcaga

SEQ ID NO: 39203 - DNA, 20 bp, Artificial Sequence
  chemically synthesized
gcagcacttggcagagggtc

SEQ ID NO: 39204 - DNA, 20 bp, Artificial Sequence
  chemically synthesized
cttggcagagggtctggtca

SEQ ID NO: 39205 - DNA, 20 bp, Artificial Sequence
  chemically synthesized
ggcagagggtctggtcatgg

SEQ ID NO: 39206 - DNA, 20 bp, Artificial Sequence
  chemically synthesized
ggtctggtcatggaagttac

SEQ ID NO: 39207 - DNA, 20 bp, Artificial Sequence
  chemically synthesized
tggaagttaccagcaaatat

SEQ ID NO: 39208 - DNA, 20 bp, Artificial Sequence
  chemically synthesized
tatgattttattttatccaa

SEQ ID NO: 39209 - DNA, 20 bp, Artificial Sequence
  chemically synthesized
attttattttatccaaaaga

SEQ ID NO: 39210 - DNA, 20 bp, Artificial Sequence
  chemically synthesized
tttattttatccaaaagaaa

SEQ ID NO: 39211 - DNA, 20 bp, Artificial Sequence
  chemically synthesized
atccaaaagaaagagaatga

SEQ ID NO: 39212 - DNA, 20 bp, Artificial Sequence
  chemically synthesized
caaaagaaagagaatgaaag

SEQ ID NO: 39213 - DNA, 20 bp, Artificial Sequence
  chemically synthesized
aaagaaagagaatgaaagaa

SEQ ID NO: 39214 - DNA, 20 bp, Artificial Sequence
  chemically synthesized
aagaaagagaatgaaagaag

SEQ ID NO: 39215 - DNA, 20 bp, Artificial Sequence
  chemically synthesized
agaaagagaatgaaagaaga

SEQ ID NO: 39216 - DNA, 20 bp, Artificial Sequence
  chemically synthesized
gaaagagaatgaaagaagag

SEQ ID NO: 39217 - DNA, 20 bp, Artificial Sequence
  chemically synthesized
aagagaatgaaagaagaggg

SEQ ID NO: 39218 - DNA, 20 bp, Artificial Sequence
  chemically synthesized
agagaatgaaagaagagggg

SEQ ID NO: 39219 - DNA, 20 bp, Artificial Sequence
  chemically synthesized
gaaagaagaggggaggaaac

SEQ ID NO: 39220 - DNA, 20 bp, Artificial Sequence
  chemically synthesized
ggggaggaaacaagactaat

SEQ ID NO: 39221 - DNA, 20 bp, Artificial Sequence
  chemically synthesized
gggaggaaacaagactaatc

SEQ ID NO: 39222 - DNA, 20 bp, Artificial Sequence
  chemically synthesized
ggaaacaagactaatcagga

SEQ ID NO: 39223 - DNA, 20 bp, Artificial Sequence
  chemically synthesized
aagactaatcaggaaagatg

SEQ ID NO: 39224 - DNA, 20 bp, Artificial Sequence
  chemically synthesized
agactaatcaggaaagatga

SEQ ID NO: 39225 - DNA, 20 bp, Artificial Sequence
  chemically synthesized
aatcaggaaagatgaaggtc

SEQ ID NO: 39226 - DNA, 20 bp, Artificial Sequence
  chemically synthesized
atcaggaaagatgaaggtct

SEQ ID NO: 39227 - DNA, 20 bp, Artificial Sequence
  chemically synthesized
tcaggaaagatgaaggtcta

SEQ ID NO: 39228 - DNA, 20 bp, Artificial Sequence
  chemically synthesized
caggaaagatgaaggtctag

SEQ ID NO: 39229 - DNA, 20 bp, Artificial Sequence
  chemically synthesized
aaagatgaaggtctaggggt

SEQ ID NO: 39230 - DNA, 20 bp, Artificial Sequence
  chemically synthesized
aagatgaaggtctaggggtg

SEQ ID NO: 39231 - DNA, 20 bp, Artificial Sequence
  chemically synthesized
agatgaaggtctaggggtga

SEQ ID NO: 39232 - DNA, 20 bp, Artificial Sequence
  chemically synthesized
tgaaggtctaggggtgaggg

SEQ ID NO: 39233 - DNA, 20 bp, Artificial Sequence
  chemically synthesized
gaaggtctaggggtgaggga

SEQ ID NO: 39234 - DNA, 20 bp, Artificial Sequence
  chemically synthesized
aggtctaggggtgagggaag

SEQ ID NO: 39235 - DNA, 20 bp, Artificial Sequence
  chemically synthesized
ctaggggtgagggaaggagt

SEQ ID NO: 39236 - DNA, 20 bp, Artificial Sequence
  chemically synthesized
taggggtgagggaaggagta

SEQ ID NO: 39237 - DNA, 20 bp, Artificial Sequence
  chemically synthesized
ggggtgagggaaggagtaag

SEQ ID NO: 39238 - DNA, 20 bp, Artificial Sequence
  chemically synthesized
ggaaggagtaaggagacata

SEQ ID NO: 39239 - DNA, 20 bp, Artificial Sequence
  chemically synthesized
gaaggagtaaggagacataa

SEQ ID NO: 39240 - DNA, 20 bp, Artificial Sequence
  chemically synthesized
aaggagacataaaggcaatg

SEQ ID NO: 39241 - DNA, 20 bp, Artificial Sequence
  chemically synthesized
ggagacataaaggcaatgtg

SEQ ID NO: 39242 - DNA, 20 bp, Artificial Sequence
  chemically synthesized
gacataaaggcaatgtggag

SEQ ID NO: 39243 - DNA, 20 bp, Artificial Sequence
  chemically synthesized
aaaggcaatgtggagcagct

SEQ ID NO: 39244 - DNA, 20 bp, Artificial Sequence
  chemically synthesized
aaggcaatgtggagcagctg

SEQ ID NO: 39245 - DNA, 20 bp, Artificial Sequence
  chemically synthesized
aggcaatgtggagcagctga

SEQ ID NO: 39246 - DNA, 20 bp, Artificial Sequence
  chemically synthesized
ggcaatgtggagcagctgag

SEQ ID NO: 39247 - DNA, 20 bp, Artificial Sequence
  chemically synthesized
gcaatgtggagcagctgagg

SEQ ID NO: 39248 - DNA, 20 bp, Artificial Sequence
  chemically synthesized
caatgtggagcagctgaggg

SEQ ID NO: 39249 - DNA, 20 bp, Artificial Sequence
  chemically synthesized
ggagcagctgaggggggaaa

SEQ ID NO: 39250 - DNA, 20 bp, Artificial Sequence
  chemically synthesized
aaatggctttcaccacttcc

SEQ ID NO: 39251 - DNA, 20 bp, Artificial Sequence
  chemically synthesized
tgcactctcaaatattttat

SEQ ID NO: 39252 - DNA, 20 bp, Artificial Sequence
  chemically synthesized
ttttataagactctatattc

SEQ ID NO: 39253 - DNA, 20 bp, Artificial Sequence
  chemically synthesized
tttataagactctatattca

SEQ ID NO: 39254 - DNA, 20 bp, Artificial Sequence
  chemically synthesized
ggtaatgtttgaaccctgct

SEQ ID NO: 39255 - DNA, 20 bp, Artificial Sequence
  chemically synthesized
atgtttgaaccctgctgagc

SEQ ID NO: 39256 - DNA, 20 bp, Artificial Sequence
  chemically synthesized
tttgaaccctgctgagccag

SEQ ID NO: 39257 - DNA, 20 bp, Artificial Sequence
  chemically synthesized
accctgctgagccagtggca

SEQ ID NO: 39258 - DNA, 20 bp, Artificial Sequence
  chemically synthesized
ccctgctgagccagtggcat

SEQ ID NO: 39259 - DNA, 20 bp, Artificial Sequence
  chemically synthesized
agccagtggcatgggtctct

SEQ ID NO: 39260 - DNA, 20 bp, Artificial Sequence
  chemically synthesized
ccagtggcatgggtctctga

SEQ ID NO: 39261 - DNA, 20 bp, Artificial Sequence
  chemically synthesized
attaacttaatttgactatc

SEQ ID NO: 39262 - DNA, 20 bp, Artificial Sequence
  chemically synthesized
taatttgactatctggtttg

SEQ ID NO: 39263 - DNA, 20 bp, Artificial Sequence
  chemically synthesized
aatttgactatctggtttgt

SEQ ID NO: 39264 - DNA, 20 bp, Artificial Sequence
  chemically synthesized
gggtgcgtttactctcatgt

SEQ ID NO: 39265 - DNA, 20 bp, Artificial Sequence
  chemically synthesized
catgtaagtcaacaatgtcc

SEQ ID NO: 39266 - DNA, 20 bp, Artificial Sequence
  chemically synthesized
atgtaagtcaacaatgtcct

SEQ ID NO: 39267 - DNA, 20 bp, Artificial Sequence
  chemically synthesized
agtcaacaatgtcctgggat

SEQ ID NO: 39268 - DNA, 20 bp, Artificial Sequence
  chemically synthesized
gtcaacaatgtcctgggatt

SEQ ID NO: 39269 - DNA, 20 bp, Artificial Sequence
  chemically synthesized
tgggattgggacacactttc

SEQ ID NO: 39270 - DNA, 20 bp, Artificial Sequence
  chemically synthesized
gggattgggacacactttct

SEQ ID NO: 39271 - DNA, 20 bp, Artificial Sequence
  chemically synthesized
acacactttctgggcactgc

SEQ ID NO: 39272 - DNA, 20 bp, Artificial Sequence
  chemically synthesized
actttctgggcactgctggc

SEQ ID NO: 39273 - DNA, 20 bp, Artificial Sequence
  chemically synthesized
actgctggccagtcccaaaa

SEQ ID NO: 39274 - DNA, 20 bp, Artificial Sequence
  chemically synthesized
ccagtcccaaaatggaacat

SEQ ID NO: 39275 - DNA, 20 bp, Artificial Sequence
  chemically synthesized
cagtcccaaaatggaacata

SEQ ID NO: 39276 - DNA, 20 bp, Artificial Sequence
  chemically synthesized
tcccaaaatggaacataagg

SEQ ID NO: 39277 - DNA, 20 bp, Artificial Sequence
  chemically synthesized
caaaatggaacataaggaag

SEQ ID NO: 39278 - DNA, 20 bp, Artificial Sequence
  chemically synthesized
acttcttttatttctgaaat

SEQ ID NO: 39279 - DNA, 20 bp, Artificial Sequence
  chemically synthesized
cttcttttatttctgaaatc

SEQ ID NO: 39280 - DNA, 20 bp, Artificial Sequence
  chemically synthesized
ttttatttctgaaatcaggt

SEQ ID NO: 39281 - DNA, 20 bp, Artificial Sequence
  chemically synthesized
ttctgaaatcaggtaagaca

SEQ ID NO: 39282 - DNA, 20 bp, Artificial Sequence
  chemically synthesized
acatagtttttttaaattat

SEQ ID NO: 39283 - DNA, 20 bp, Artificial Sequence
  chemically synthesized
ttattttttctcccacaatg

SEQ ID NO: 39284 - DNA, 20 bp, Artificial Sequence
  chemically synthesized
tagtaaaaatacatatgcca

SEQ ID NO: 39285 - DNA, 20 bp, Artificial Sequence
  chemically synthesized
tttttgattcatgaaattcc

SEQ ID NO: 39286 - DNA, 20 bp, Artificial Sequence
  chemically synthesized
tgaaaaattcttaaaaaaat

SEQ ID NO: 39287 - DNA, 20 bp, Artificial Sequence
  chemically synthesized
ataagtttaatttccccgtg

SEQ ID NO: 39288 - DNA, 20 bp, Artificial Sequence
  chemically synthesized
tttccccgtgaagactgtca

SEQ ID NO: 39289 - DNA, 20 bp, Artificial Sequence
  chemically synthesized
cgtgaagactgtcacggtgc

SEQ ID NO: 39290 - DNA, 20 bp, Artificial Sequence
  chemically synthesized
tgtcacggtgctggaatgaa

SEQ ID NO: 39291 - DNA, 20 bp, Artificial Sequence
  chemically synthesized
gtcacggtgctggaatgaat

SEQ ID NO: 39292 - DNA, 20 bp, Artificial Sequence
  chemically synthesized
acggtgctggaatgaatggg

SEQ ID NO: 39293 - DNA, 20 bp, Artificial Sequence
  chemically synthesized
tgaatgggcagaaaaaataa

SEQ ID NO: 39294 - DNA, 20 bp, Artificial Sequence
  chemically synthesized
ggttgatttttctaatctaa

SEQ ID NO: 39295 - DNA, 20 bp, Artificial Sequence
  chemically synthesized
ttgatttttctaatctaaaa

SEQ ID NO: 39296 - DNA, 20 bp, Artificial Sequence
  chemically synthesized
aaaagagtgtgcctacatga

SEQ ID NO: 39297 - DNA, 20 bp, Artificial Sequence
  chemically synthesized
gagtgtgcctacatgatggc

SEQ ID NO: 39298 - DNA, 20 bp, Artificial Sequence
  chemically synthesized
tgcctacatgatggccagtc

SEQ ID NO: 39299 - DNA, 20 bp, Artificial Sequence
  chemically synthesized
cagtctggctgaaaaataaa

SEQ ID NO: 39300 - DNA, 20 bp, Artificial Sequence
  chemically synthesized
tgaaaaataaatagccattg

SEQ ID NO: 39301 - DNA, 20 bp, Artificial Sequence
  chemically synthesized
ccattgtagctaactatgca

SEQ ID NO: 39302 - DNA, 20 bp, Artificial Sequence
  chemically synthesized
cattgtagctaactatgcaa

SEQ ID NO: 39303 - DNA, 20 bp, Artificial Sequence
  chemically synthesized
gtagctaactatgcaaagga

SEQ ID NO: 39304 - DNA, 20 bp, Artificial Sequence
  chemically synthesized
taactatgcaaaggatggct

SEQ ID NO: 39305 - DNA, 20 bp, Artificial Sequence
  chemically synthesized
ggatggctaagctcttcgct

SEQ ID NO: 39306 - DNA, 20 bp, Artificial Sequence
  chemically synthesized
taagctcttcgcttggttct

SEQ ID NO: 39307 - DNA, 20 bp, Artificial Sequence
  chemically synthesized
taatttatatcatctctgtt

SEQ ID NO: 39308 - DNA, 20 bp, Artificial Sequence
  chemically synthesized
aatttatatcatctctgttc

SEQ ID NO: 39309 - DNA, 20 bp, Artificial Sequence
  chemically synthesized
aggtgccatgctcccctcac

SEQ ID NO: 39310 - DNA, 20 bp, Artificial Sequence
  chemically synthesized
gccatgctcccctcactagc

SEQ ID NO: 39311 - DNA, 20 bp, Artificial Sequence
  chemically synthesized
aataactctttgaatatgtt

SEQ ID NO: 39312 - DNA, 20 bp, Artificial Sequence
  chemically synthesized
ttggttccttgacctgttca

SEQ ID NO: 39313 - DNA, 20 bp, Artificial Sequence
  chemically synthesized
ggttccttgacctgttcatg

SEQ ID NO: 39314 - DNA, 20 bp, Artificial Sequence
  chemically synthesized
tccttgacctgttcatggag

SEQ ID NO: 39315 - DNA, 20 bp, Artificial Sequence
  chemically synthesized
ccttgacctgttcatggagt

SEQ ID NO: 39316 - DNA, 20 bp, Artificial Sequence
  chemically synthesized
cctgttcatggagtgggact

SEQ ID NO: 39317 - DNA, 20 bp, Artificial Sequence
  chemically synthesized
cagcatttctctctttgtta

SEQ ID NO: 39318 - DNA, 20 bp, Artificial Sequence
  chemically synthesized
ttctctctttgttatggcct

SEQ ID NO: 39319 - DNA, 20 bp, Artificial Sequence
  chemically synthesized
ctctttgttatggcctgagt

SEQ ID NO: 39320 - DNA, 20 bp, Artificial Sequence
  chemically synthesized
tctttgttatggcctgagta

SEQ ID NO: 39321 - DNA, 20 bp, Artificial Sequence
  chemically synthesized
gcctgagtaaggctttccat

SEQ ID NO: 39322 - DNA, 20 bp, Artificial Sequence
  chemically synthesized
atacatttgcttcttatccc

SEQ ID NO: 39323 - DNA, 20 bp, Artificial Sequence
  chemically synthesized
acatttgcttcttatccctg

SEQ ID NO: 39324 - DNA, 20 bp, Artificial Sequence
  chemically synthesized
aattatacacatccatttgc

SEQ ID NO: 39325 - DNA, 20 bp, Artificial Sequence
  chemically synthesized
ataatgattcaacaaatact

SEQ ID NO: 39326 - DNA, 20 bp, Artificial Sequence
  chemically synthesized
taatgattcaacaaatactc

SEQ ID NO: 39327 - DNA, 20 bp, Artificial Sequence
  chemically synthesized
aatgattcaacaaatactca

SEQ ID NO: 39328 - DNA, 20 bp, Artificial Sequence
  chemically synthesized
aaatactcagggtatttgtt

SEQ ID NO: 39329 - DNA, 20 bp, Artificial Sequence
  chemically synthesized
tactcagggtatttgttgag

SEQ ID NO: 39330 - DNA, 20 bp, Artificial Sequence
  chemically synthesized
actcagggtatttgttgagt

SEQ ID NO: 39331 - DNA, 20 bp, Artificial Sequence
  chemically synthesized
agggtatttgttgagtgggt

SEQ ID NO: 39332 - DNA, 20 bp, Artificial Sequence
  chemically synthesized
gggtatttgttgagtgggtt

SEQ ID NO: 39333 - DNA, 20 bp, Artificial Sequence
  chemically synthesized
ccgtgtgtgattgtgaatgt

SEQ ID NO: 39334 - DNA, 20 bp, Artificial Sequence
  chemically synthesized
tgtgtgtcctttacaaatac

SEQ ID NO: 39335 - DNA, 20 bp, Artificial Sequence
  chemically synthesized
tttacaaatactagcttatt

SEQ ID NO: 39336 - DNA, 20 bp, Artificial Sequence
  chemically synthesized
atactagcttatttagctca

SEQ ID NO: 39337 - DNA, 20 bp, Artificial Sequence
  chemically synthesized
agcttatttagctcatggta

SEQ ID NO: 39338 - DNA, 20 bp, Artificial Sequence
  chemically synthesized
gcttatttagctcatggtat

SEQ ID NO: 39339 - DNA, 20 bp, Artificial Sequence
  chemically synthesized
tatttagctcatggtatagg

SEQ ID NO: 39340 - DNA, 20 bp, Artificial Sequence
  chemically synthesized
atttagctcatggtataggt

SEQ ID NO: 39341 - DNA, 20 bp, Artificial Sequence
  chemically synthesized
tttagctcatggtataggta

SEQ ID NO: 39342 - DNA, 20 bp, Artificial Sequence
  chemically synthesized
agctcatggtataggtaggg

SEQ ID NO: 39343 - DNA, 20 bp, Artificial Sequence
  chemically synthesized
atggtataggtagggtagca

SEQ ID NO: 39344 - DNA, 20 bp, Artificial Sequence
  chemically synthesized
tcatccccattttataaaca

SEQ ID NO: 39345 - DNA, 20 bp, Artificial Sequence
  chemically synthesized
attttataaacaaagaaatc

SEQ ID NO: 39346 - DNA, 20 bp, Artificial Sequence
  chemically synthesized
taaacaaagaaatctagact

SEQ ID NO: 39347 - DNA, 20 bp, Artificial Sequence
  chemically synthesized
aaacaaagaaatctagactt

SEQ ID NO: 39348 - DNA, 20 bp, Artificial Sequence
  chemically synthesized
cgtgaccaaattcccaaatc

SEQ ID NO: 39349 - DNA, 20 bp, Artificial Sequence
  chemically synthesized
gtgaccaaattcccaaatca

SEQ ID NO: 39350 - DNA, 20 bp, Artificial Sequence
  chemically synthesized
attcccaaatcaaggaaata

SEQ ID NO: 39351 - DNA, 20 bp, Artificial Sequence
  chemically synthesized
atcaaggaaataaagaaacc

SEQ ID NO: 39352 - DNA, 20 bp, Artificial Sequence
  chemically synthesized
aaataaagaaacctggattt

SEQ ID NO: 39353 - DNA, 20 bp, Artificial Sequence
  chemically synthesized
aaagaaacctggatttaagc

SEQ ID NO: 39354 - DNA, 20 bp, Artificial Sequence
  chemically synthesized
tggatttaagccagatttcc

SEQ ID NO: 39355 - DNA, 20 bp, Artificial Sequence
  chemically synthesized
cagatttccaagaaaaaatc

SEQ ID NO: 39356 - DNA, 20 bp, Artificial Sequence
  chemically synthesized
agatttccaagaaaaaatct

SEQ ID NO: 39357 - DNA, 20 bp, Artificial Sequence
  chemically synthesized
gatttccaagaaaaaatcta

SEQ ID NO: 39358 - DNA, 20 bp, Artificial Sequence
  chemically synthesized
aacacattccaatgtaactg

SEQ ID NO: 39359 - DNA, 20 bp, Artificial Sequence
  chemically synthesized
cacattccaatgtaactgaa

SEQ ID NO: 39360 - DNA, 20 bp, Artificial Sequence
  chemically synthesized
attccaatgtaactgaagag

SEQ ID NO: 39361 - DNA, 20 bp, Artificial Sequence
  chemically synthesized
ttccaatgtaactgaagagc

SEQ ID NO: 39362 - DNA, 20 bp, Artificial Sequence
  chemically synthesized
ggttaattgtttgccacttg

SEQ ID NO: 39363 - DNA, 20 bp, Artificial Sequence
  chemically synthesized
gccacttgcagaatccaatt

SEQ ID NO: 39364 - DNA, 20 bp, Artificial Sequence
  chemically synthesized
acttgcagaatccaattaag

SEQ ID NO: 39365 - DNA, 20 bp, Artificial Sequence
  chemically synthesized
ttgcagaatccaattaagaa

SEQ ID NO: 39366 - DNA, 20 bp, Artificial Sequence
  chemically synthesized
gcagaatccaattaagaaga

SEQ ID NO: 39367 - DNA, 20 bp, Artificial Sequence
  chemically synthesized
gaatccaattaagaagagag

SEQ ID NO: 39368 - DNA, 20 bp, Artificial Sequence
  chemically synthesized
caattaagaagagagaagtc

SEQ ID NO: 39369 - DNA, 20 bp, Artificial Sequence
  chemically synthesized
gaagagagaagtctggtata

SEQ ID NO: 39370 - DNA, 20 bp, Artificial Sequence
  chemically synthesized
agagaagtctggtataaaga

SEQ ID NO: 39371 - DNA, 20 bp, Artificial Sequence
  chemically synthesized
aagaaagtgatttgcttcca

SEQ ID NO: 39372 - DNA, 20 bp, Artificial Sequence
  chemically synthesized
aagtgatttgcttccaaagc

SEQ ID NO: 39373 - DNA, 20 bp, Artificial Sequence
  chemically synthesized
atttgcttccaaagctagct

SEQ ID NO: 39374 - DNA, 20 bp, Artificial Sequence
  chemically synthesized
tttgcttccaaagctagctt

SEQ ID NO: 39375 - DNA, 20 bp, Artificial Sequence
  chemically synthesized
ttgcttccaaagctagctta

SEQ ID NO: 39376 - DNA, 20 bp, Artificial Sequence
  chemically synthesized
tgcttccaaagctagcttag

SEQ ID NO: 39377 - DNA, 20 bp, Artificial Sequence
  chemically synthesized
ttccaaagctagcttagggg

SEQ ID NO: 39378 - DNA, 20 bp, Artificial Sequence
  chemically synthesized
ctagcttaggggaagaaatg

SEQ ID NO: 39379 - DNA, 20 bp, Artificial Sequence
  chemically synthesized
gcttaggggaagaaatgcag

SEQ ID NO: 39380 - DNA, 20 bp, Artificial Sequence
  chemically synthesized
cctgccgtactacttcactt

SEQ ID NO: 39381 - DNA, 20 bp, Artificial Sequence
  chemically synthesized
ctgccgtactacttcacttt

SEQ ID NO: 39382 - DNA, 20 bp, Artificial Sequence
  chemically synthesized
gccgtactacttcactttag

SEQ ID NO: 39383 - DNA, 20 bp, Artificial Sequence
  chemically synthesized
gtactacttcactttaggag

SEQ ID NO: 39384 - DNA, 20 bp, Artificial Sequence
  chemically synthesized
tacttcactttaggagcaga

SEQ ID NO: 39385 - DNA, 20 bp, Artificial Sequence
  chemically synthesized
ttcactttaggagcagaaag

SEQ ID NO: 39386 - DNA, 20 bp, Artificial Sequence
  chemically synthesized
gcagaaagtggcacttttaa

SEQ ID NO: 39387 - DNA, 20 bp, Artificial Sequence
  chemically synthesized
cagaaagtggcacttttaaa

SEQ ID NO: 39388 - DNA, 20 bp, Artificial Sequence
  chemically synthesized
gtggcacttttaaaaggcaa

SEQ ID NO: 39389 - DNA, 20 bp, Artificial Sequence
  chemically synthesized
ggcacttttaaaaggcaaca

SEQ ID NO: 39390 - DNA, 20 bp, Artificial Sequence
  chemically synthesized
gcacttttaaaaggcaacag

SEQ ID NO: 39391 - DNA, 20 bp, Artificial Sequence
  chemically synthesized
acttttaaaaggcaacagag

SEQ ID NO: 39392 - DNA, 20 bp, Artificial Sequence
  chemically synthesized
cttttaaaaggcaacagagg

SEQ ID NO: 39393 - DNA, 20 bp, Artificial Sequence
  chemically synthesized
taaaaggcaacagaggaggc

SEQ ID NO: 39394 - DNA, 20 bp, Artificial Sequence
  chemically synthesized
aggcaacagaggaggcgagc

SEQ ID NO: 39395 - DNA, 20 bp, Artificial Sequence
  chemically synthesized
ggcaacagaggaggcgagca

SEQ ID NO: 39396 - DNA, 20 bp, Artificial Sequence
  chemically synthesized
agaggaggcgagcaaggatt

SEQ ID NO: 39397 - DNA, 20 bp, Artificial Sequence
  chemically synthesized
gaggaggcgagcaaggattc

SEQ ID NO: 39398 - DNA, 20 bp, Artificial Sequence
  chemically synthesized
aggaggcgagcaaggattca

SEQ ID NO: 39399 - DNA, 20 bp, Artificial Sequence
  chemically synthesized
ggaggcgagcaaggattcag

SEQ ID NO: 39400 - DNA, 20 bp, Artificial Sequence
  chemically synthesized
aaggattcaggggtccatgc

SEQ ID NO: 39401 - DNA, 20 bp, Artificial Sequence
  chemically synthesized
ttcaggggtccatgctagct

SEQ ID NO: 39402 - DNA, 20 bp, Artificial Sequence
  chemically synthesized
tcaggggtccatgctagctt

SEQ ID NO: 39403 - DNA, 20 bp, Artificial Sequence
  chemically synthesized
agcttgggcaccttatccac

SEQ ID NO: 39404 - DNA, 20 bp, Artificial Sequence
  chemically synthesized
gcttgggcaccttatccacc

SEQ ID NO: 39405 - DNA, 20 bp, Artificial Sequence
  chemically synthesized
tgggcaccttatccaccagg

SEQ ID NO: 39406 - DNA, 20 bp, Artificial Sequence
  chemically synthesized
accttatccaccaggtagtt

SEQ ID NO: 39407 - DNA, 20 bp, Artificial Sequence
  chemically synthesized
ttatccaccaggtagttgag

SEQ ID NO: 39408 - DNA, 20 bp, Artificial Sequence
  chemically synthesized
gtagttgagcagttgcctgc

SEQ ID NO: 39409 - DNA, 20 bp, Artificial Sequence
  chemically synthesized
ttgcctgctggtgcctttgt

SEQ ID NO: 39410 - DNA, 20 bp, Artificial Sequence
  chemically synthesized
cctgctggtgcctttgtgag

SEQ ID NO: 39411 - DNA, 20 bp, Artificial Sequence
  chemically synthesized
ctgctggtgcctttgtgagc

SEQ ID NO: 39412 - DNA, 20 bp, Artificial Sequence
  chemically synthesized
tgctggtgcctttgtgagca

SEQ ID NO: 39413 - DNA, 20 bp, Artificial Sequence
  chemically synthesized
tgagcagggtgttgtccctt

SEQ ID NO: 39414 - DNA, 20 bp, Artificial Sequence
  chemically synthesized
gagcagggtgttgtcccttg

SEQ ID NO: 39415 - DNA, 20 bp, Artificial Sequence
  chemically synthesized
tgtcccttgaggcaaatctc

SEQ ID NO: 39416 - DNA, 20 bp, Artificial Sequence
  chemically synthesized
tcccttgaggcaaatctctg

SEQ ID NO: 39417 - DNA, 20 bp, Artificial Sequence
  chemically synthesized
cccttgaggcaaatctctgg

SEQ ID NO: 39418 - DNA, 20 bp, Artificial Sequence
  chemically synthesized
ccttgaggcaaatctctgga

SEQ ID NO: 39419 - DNA, 20 bp, Artificial Sequence
  chemically synthesized
gaggcaaatctctggagggt

SEQ ID NO: 39420 - DNA, 20 bp, Artificial Sequence
  chemically synthesized
ggcaaatctctggagggtga

SEQ ID NO: 39421 - DNA, 20 bp, Artificial Sequence
  chemically synthesized
tctggagggtgagagttttg

SEQ ID NO: 39422 - DNA, 20 bp, Artificial Sequence
  chemically synthesized
ggagggtgagagttttgtag

SEQ ID NO: 39423 - DNA, 20 bp, Artificial Sequence
  chemically synthesized
gagggtgagagttttgtagt

SEQ ID NO: 39424 - DNA, 20 bp, Artificial Sequence
  chemically synthesized
gttttgtagtgggcatgctt

SEQ ID NO: 39425 - DNA, 20 bp, Artificial Sequence
  chemically synthesized
ttataaatcacctgtgaact

SEQ ID NO: 39426 - DNA, 20 bp, Artificial Sequence
  chemically synthesized
tataaatcacctgtgaactc

SEQ ID NO: 39427 - DNA, 20 bp, Artificial Sequence
  chemically synthesized
taaatcacctgtgaactcag

SEQ ID NO: 39428 - DNA, 20 bp, Artificial Sequence
  chemically synthesized
aactcaggagttccatcttg

SEQ ID NO: 39429 - DNA, 20 bp, Artificial Sequence
  chemically synthesized
tccatcttgaagcacataca

SEQ ID NO: 39430 - DNA, 20 bp, Artificial Sequence
  chemically synthesized
tcttgaagcacatacatagt

SEQ ID NO: 39431 - DNA, 20 bp, Artificial Sequence
  chemically synthesized
agttagatgaacttgccctg

SEQ ID NO: 39432 - DNA, 20 bp, Artificial Sequence
  chemically synthesized
gttagatgaacttgccctgc

SEQ ID NO: 39433 - DNA, 20 bp, Artificial Sequence
  chemically synthesized
ttagatgaacttgccctgca

SEQ ID NO: 39434 - DNA, 20 bp, Artificial Sequence
  chemically synthesized
agatgaacttgccctgcagg

SEQ ID NO: 39435 - DNA, 20 bp, Artificial Sequence
  chemically synthesized
atgaacttgccctgcaggga

SEQ ID NO: 39436 - DNA, 20 bp, Artificial Sequence
  chemically synthesized
ctgcagggagagtctgatga

SEQ ID NO: 39437 - DNA, 20 bp, Artificial Sequence
  chemically synthesized
tgcagggagagtctgatgaa

SEQ ID NO: 39438 - DNA, 20 bp, Artificial Sequence
  chemically synthesized
gcagggagagtctgatgaaa

SEQ ID NO: 39439 - DNA, 20 bp, Artificial Sequence
  chemically synthesized
agggagagtctgatgaaagg

SEQ ID NO: 39440 - DNA, 20 bp, Artificial Sequence
  chemically synthesized
gggagagtctgatgaaaggg

SEQ ID NO: 39441 - DNA, 20 bp, Artificial Sequence
  chemically synthesized
agagtctgatgaaagggagg

SEQ ID NO: 39442 - DNA, 20 bp, Artificial Sequence
  chemically synthesized
caatttaatctataaattac

SEQ ID NO: 39443 - DNA, 20 bp, Artificial Sequence
  chemically synthesized
attaccagataaaattttac

SEQ ID NO: 39444 - DNA, 20 bp, Artificial Sequence
  chemically synthesized
aattttacaagttgacttta

SEQ ID NO: 39445 - DNA, 20 bp, Artificial Sequence
  chemically synthesized
aagtcaaacacatttgaatt

SEQ ID NO: 39446 - DNA, 20 bp, Artificial Sequence
  chemically synthesized
tcaaacacatttgaatttag

SEQ ID NO: 39447 - DNA, 20 bp, Artificial Sequence
  chemically synthesized
aacacatttgaatttagtgg

SEQ ID NO: 39448 - DNA, 20 bp, Artificial Sequence
  chemically synthesized
gaatttagtggaagccattc

SEQ ID NO: 39449 - DNA, 20 bp, Artificial Sequence
  chemically synthesized
agccattcaagaaaatatca

SEQ ID NO: 39450 - DNA, 20 bp, Artificial Sequence
  chemically synthesized
agaaaatatcaaagaaaata

SEQ ID NO: 39451 - DNA, 20 bp, Artificial Sequence
  chemically synthesized
aaaatatcaaagaaaataca

SEQ ID NO: 39452 - DNA, 20 bp, Artificial Sequence
  chemically synthesized
atatcaaagaaaatacagag

SEQ ID NO: 39453 - DNA, 20 bp, Artificial Sequence
  chemically synthesized
tatcaaagaaaatacagagc

SEQ ID NO: 39454 - DNA, 20 bp, Artificial Sequence
  chemically synthesized
tcaaagaaaatacagagcag

SEQ ID NO: 39455 - DNA, 20 bp, Artificial Sequence
  chemically synthesized
aagaaaatacagagcaggag

SEQ ID NO: 39456 - DNA, 20 bp, Artificial Sequence
  chemically synthesized
atacagagcaggagaagatt

SEQ ID NO: 39457 - DNA, 20 bp, Artificial Sequence
  chemically synthesized
gagcaggagaagattaagca

SEQ ID NO: 39458 - DNA, 20 bp, Artificial Sequence
  chemically synthesized
gcaggagaagattaagcaaa

SEQ ID NO: 39459 - DNA, 20 bp, Artificial Sequence
  chemically synthesized
agattaagcaaagagttttt

SEQ ID NO: 39460 - DNA, 20 bp, Artificial Sequence
  chemically synthesized
gattaagcaaagagtttttt

SEQ ID NO: 39461 - DNA, 20 bp, Artificial Sequence
  chemically synthesized
attaagcaaagagttttttg

SEQ ID NO: 39462 - DNA, 20 bp, Artificial Sequence
  chemically synthesized
aaagagttttttggggaaat

SEQ ID NO: 39463 - DNA, 20 bp, Artificial Sequence
  chemically synthesized
ggtgtctatgtctgtgtgtg

SEQ ID NO: 39464 - DNA, 20 bp, Artificial Sequence
  chemically synthesized
gtgtctatgtctgtgtgtgt

SEQ ID NO: 39465 - DNA, 20 bp, Artificial Sequence
  chemically synthesized
tgtctatgtctgtgtgtgta

SEQ ID NO: 39466 - DNA, 20 bp, Artificial Sequence
  chemically synthesized
tctatgtctgtgtgtgtagg

SEQ ID NO: 39467 - DNA, 20 bp, Artificial Sequence
  chemically synthesized
gtctgtgtgtgtagggagtg

SEQ ID NO: 39468 - DNA, 20 bp, Artificial Sequence
  chemically synthesized
tctgtgtgtgtagggagtgc

SEQ ID NO: 39469 - DNA, 20 bp, Artificial Sequence
  chemically synthesized
ctgtgtgtgtagggagtgca

SEQ ID NO: 39470 - DNA, 20 bp, Artificial Sequence
  chemically synthesized
tgtgtgtgtagggagtgcag

SEQ ID NO: 39471 - DNA, 20 bp, Artificial Sequence
  chemically synthesized
gggatatgaatattctattt

SEQ ID NO: 39472 - DNA, 20 bp, Artificial Sequence
  chemically synthesized
gaatattctatttcagccca

SEQ ID NO: 39473 - DNA, 20 bp, Artificial Sequence
  chemically synthesized
ctatttcagcccatggaaac

SEQ ID NO: 39474 - DNA, 20 bp, Artificial Sequence
  chemically synthesized
tatttcagcccatggaaact

SEQ ID NO: 39475 - DNA, 20 bp, Artificial Sequence
  chemically synthesized
agcccatggaaactaggatg

SEQ ID NO: 39476 - DNA, 20 bp, Artificial Sequence
  chemically synthesized
tagatcactgtgaacttatt

SEQ ID NO: 39477 - DNA, 20 bp, Artificial Sequence
  chemically synthesized
atcactgtgaacttattcag

SEQ ID NO: 39478 - DNA, 20 bp, Artificial Sequence
  chemically synthesized
tcactgtgaacttattcagc

SEQ ID NO: 39479 - DNA, 20 bp, Artificial Sequence
  chemically synthesized
tattcagcaggctacaccca

SEQ ID NO: 39480 - DNA, 20 bp, Artificial Sequence
  chemically synthesized
attcagcaggctacacccaa

SEQ ID NO: 39481 - DNA, 20 bp, Artificial Sequence
  chemically synthesized
agcaggctacacccaaaggc

SEQ ID NO: 39482 - DNA, 20 bp, Artificial Sequence
  chemically synthesized
tagaacaaacttctctgcca

SEQ ID NO: 39483 - DNA, 20 bp, Artificial Sequence
  chemically synthesized
agaacaaacttctctgccac

SEQ ID NO: 39484 - DNA, 20 bp, Artificial Sequence
  chemically synthesized
aacatatgttttaatcgacc

SEQ ID NO: 39485 - DNA, 20 bp, Artificial Sequence
  chemically synthesized
acatatgttttaatcgacct

SEQ ID NO: 39486 - DNA, 20 bp, Artificial Sequence
  chemically synthesized
catatgttttaatcgacctg

SEQ ID NO: 39487 - DNA, 20 bp, Artificial Sequence
  chemically synthesized
atatgttttaatcgacctgg

SEQ ID NO: 39488 - DNA, 20 bp, Artificial Sequence
  chemically synthesized
tatgttttaatcgacctggg

SEQ ID NO: 39489 - DNA, 20 bp, Artificial Sequence
  chemically synthesized
tggggggcacattctctgat

SEQ ID NO: 39490 - DNA, 20 bp, Artificial Sequence
  chemically synthesized
cattctctgataagctcttt

SEQ ID NO: 39491 - DNA, 20 bp, Artificial Sequence
  chemically synthesized
ctctgataagctcttttgga

SEQ ID NO: 39492 - DNA, 20 bp, Artificial Sequence
  chemically synthesized
gataagctcttttggaaagc

SEQ ID NO: 39493 - DNA, 20 bp, Artificial Sequence
  chemically synthesized
ataagctcttttggaaagcc

SEQ ID NO: 39494 - DNA, 20 bp, Artificial Sequence
  chemically synthesized
ttggaaagccaggctttctg

SEQ ID NO: 39495 - DNA, 20 bp, Artificial Sequence
  chemically synthesized
gttatctttccaatgtgtgc

SEQ ID NO: 39496 - DNA, 20 bp, Artificial Sequence
  chemically synthesized
ccaatgtgtgctggaatgcc

SEQ ID NO: 39497 - DNA, 20 bp, Artificial Sequence
  chemically synthesized
caatgtgtgctggaatgccc

SEQ ID NO: 39498 - DNA, 20 bp, Artificial Sequence
  chemically synthesized
aatgtgtgctggaatgcccg

SEQ ID NO: 39499 - DNA, 20 bp, Artificial Sequence
  chemically synthesized
tgtgtgctggaatgcccggg

SEQ ID NO: 39500 - DNA, 20 bp, Artificial Sequence
  chemically synthesized
tgtgctggaatgcccgggga

SEQ ID NO: 39501 - DNA, 20 bp, Artificial Sequence
  chemically synthesized
gtgctggaatgcccggggag

SEQ ID NO: 39502 - DNA, 20 bp, Artificial Sequence
  chemically synthesized
gaatgcccggggagaggaaa

SEQ ID NO: 39503 - DNA, 20 bp, Artificial Sequence
  chemically synthesized
agaggaaaaagtttctttta

SEQ ID NO: 39504 - DNA, 20 bp, Artificial Sequence
  chemically synthesized
gtttcttttacagccatgct

SEQ ID NO: 39505 - DNA, 20 bp, Artificial Sequence
  chemically synthesized
cttttacagccatgctcagt

SEQ ID NO: 39506 - DNA, 20 bp, Artificial Sequence
  chemically synthesized
ttacagccatgctcagtgag

SEQ ID NO: 39507 - DNA, 20 bp, Artificial Sequence
  chemically synthesized
cagccatgctcagtgagaag

SEQ ID NO: 39508 - DNA, 20 bp, Artificial Sequence
  chemically synthesized
gccatgctcagtgagaagcg

SEQ ID NO: 39509 - DNA, 20 bp, Artificial Sequence
  chemically synthesized
tcttctattcacaaattgct

SEQ ID NO: 39510 - DNA, 20 bp, Artificial Sequence
  chemically synthesized
gcatacacattcacacacca

SEQ ID NO: 39511 - DNA, 20 bp, Artificial Sequence
  chemically synthesized
acacattcacacaccacagt

SEQ ID NO: 39512 - DNA, 20 bp, Artificial Sequence
  chemically synthesized
cacattcacacaccacagtg

SEQ ID NO: 39513 - DNA, 20 bp, Artificial Sequence
  chemically synthesized
attcacacaccacagtgagg

SEQ ID NO: 39514 - DNA, 20 bp, Artificial Sequence
  chemically synthesized
ttaataaaatacatttactt

SEQ ID NO: 39515 - DNA, 20 bp, Artificial Sequence
  chemically synthesized
ataaaatacatttacttcag

SEQ ID NO: 39516 - DNA, 20 bp, Artificial Sequence
  chemically synthesized
acattttgcctataatataa

SEQ ID NO: 39517 - DNA, 20 bp, Artificial Sequence
  chemically synthesized
aaaagtatttttcctattaa

SEQ ID NO: 39518 - DNA, 20 bp, Artificial Sequence
  chemically synthesized
ttaaatccccattgccatat

SEQ ID NO: 39519 - DNA, 20 bp, Artificial Sequence
  chemically synthesized
ccccattgccatatgagccc

SEQ ID NO: 39520 - DNA, 20 bp, Artificial Sequence
  chemically synthesized
ccattgccatatgagccctg

SEQ ID NO: 39521 - DNA, 20 bp, Artificial Sequence
  chemically synthesized
cattgccatatgagccctgg

SEQ ID NO: 39522 - DNA, 20 bp, Artificial Sequence
  chemically synthesized
tatgagccctggaggtgaat

SEQ ID NO: 39523 - DNA, 20 bp, Artificial Sequence
  chemically synthesized
tgagccctggaggtgaatca

SEQ ID NO: 39524 - DNA, 20 bp, Artificial Sequence
  chemically synthesized
gaggtgaatcagagaaacaa

SEQ ID NO: 39525 - DNA, 20 bp, Artificial Sequence
  chemically synthesized
aggtgaatcagagaaacaaa

SEQ ID NO: 39526 - DNA, 20 bp, Artificial Sequence
  chemically synthesized
tcagagaaacaaaaggattg

SEQ ID NO: 39527 - DNA, 20 bp, Artificial Sequence
  chemically synthesized
aaggattgtggaaaaatcat

SEQ ID NO: 39528 - DNA, 20 bp, Artificial Sequence
  chemically synthesized
aggattgtggaaaaatcatc

SEQ ID NO: 39529 - DNA, 20 bp, Artificial Sequence
  chemically synthesized
aaaaatcatcaggttaaaaa

SEQ ID NO: 39530 - DNA, 20 bp, Artificial Sequence
  chemically synthesized
aagaaaaattgattctgttt

SEQ ID NO: 39531 - DNA, 20 bp, Artificial Sequence
  chemically synthesized
agaaaaattgattctgtttt

SEQ ID NO: 39532 - DNA, 20 bp, Artificial Sequence
  chemically synthesized
ttctgttttgggatatttcc

SEQ ID NO: 39533 - DNA, 20 bp, Artificial Sequence
  chemically synthesized
gggatatttcctagcaacat

SEQ ID NO: 39534 - DNA, 20 bp, Artificial Sequence
  chemically synthesized
tatttcctagcaacatgagc

SEQ ID NO: 39535 - DNA, 20 bp, Artificial Sequence
  chemically synthesized
atttcctagcaacatgagct

SEQ ID NO: 39536 - DNA, 20 bp, Artificial Sequence
  chemically synthesized
tttcctagcaacatgagctg

SEQ ID NO: 39537 - DNA, 20 bp, Artificial Sequence
  chemically synthesized
tcctagcaacatgagctggg

SEQ ID NO: 39538 - DNA, 20 bp, Artificial Sequence
  chemically synthesized
cctagcaacatgagctgggg

SEQ ID NO: 39539 - DNA, 20 bp, Artificial Sequence
  chemically synthesized
ctagcaacatgagctgggga

SEQ ID NO: 39540 - DNA, 20 bp, Artificial Sequence
  chemically synthesized
tagcaacatgagctggggag

SEQ ID NO: 39541 - DNA, 20 bp, Artificial Sequence
  chemically synthesized
atgagctggggaggggatct

SEQ ID NO: 39542 - DNA, 20 bp, Artificial Sequence
  chemically synthesized
agctggggaggggatctcag

SEQ ID NO: 39543 - DNA, 20 bp, Artificial Sequence
  chemically synthesized
ctcagcagtgatgctctatg

SEQ ID NO: 39544 - DNA, 20 bp, Artificial Sequence
  chemically synthesized
tgaagcataataaaatgaca

SEQ ID NO: 39545 - DNA, 20 bp, Artificial Sequence
  chemically synthesized
ataataaaatgacacagtta

SEQ ID NO: 39546 - DNA, 20 bp, Artificial Sequence
  chemically synthesized
taataaaatgacacagttac

SEQ ID NO: 39547 - DNA, 20 bp, Artificial Sequence
  chemically synthesized
tgacacagttacaggtaact

SEQ ID NO: 39548 - DNA, 20 bp, Artificial Sequence
  chemically synthesized
agttacaggtaacttagtta

SEQ ID NO: 39549 - DNA, 20 bp, Artificial Sequence
  chemically synthesized
gttacaggtaacttagttaa

SEQ ID NO: 39550 - DNA, 20 bp, Artificial Sequence
  chemically synthesized
ttacaggtaacttagttaaa

SEQ ID NO: 39551 - DNA, 20 bp, Artificial Sequence
  chemically synthesized
tacaggtaacttagttaaag

SEQ ID NO: 39552 - DNA, 20 bp, Artificial Sequence
  chemically synthesized
acaggtaacttagttaaagg

SEQ ID NO: 39553 - DNA, 20 bp, Artificial Sequence
  chemically synthesized
tagttaaagggggaaataaa

SEQ ID NO: 39554 - DNA, 20 bp, Artificial Sequence
  chemically synthesized
ttaaagggggaaataaatgg

SEQ ID NO: 39555 - DNA, 20 bp, Artificial Sequence
  chemically synthesized
ctctttttgaatatcaattg

SEQ ID NO: 39556 - DNA, 20 bp, Artificial Sequence
  chemically synthesized
atgtttaactgaactcactg

SEQ ID NO: 39557 - DNA, 20 bp, Artificial Sequence
  chemically synthesized
tgtttaactgaactcactgt

SEQ ID NO: 39558 - DNA, 20 bp, Artificial Sequence
  chemically synthesized
ttaactgaactcactgtagg

SEQ ID NO: 39559 - DNA, 20 bp, Artificial Sequence
  chemically synthesized
ttaatttattgtgtgttttg

SEQ ID NO: 39560 - DNA, 20 bp, Artificial Sequence
  chemically synthesized
gtgttttgaagtcacactgt

SEQ ID NO: 39561 - DNA, 20 bp, Artificial Sequence
  chemically synthesized
tgaagtcacactgtgagcta

SEQ ID NO: 39562 - DNA, 20 bp, Artificial Sequence
  chemically synthesized
gtgagctatagaatttaccc

SEQ ID NO: 39563 - DNA, 20 bp, Artificial Sequence
  chemically synthesized
tacccaagcacaactcttcc

SEQ ID NO: 39564 - DNA, 20 bp, Artificial Sequence
  chemically synthesized
aagcacaactcttcctggaa

SEQ ID NO: 39565 - DNA, 20 bp, Artificial Sequence
  chemically synthesized
gcacaactcttcctggaaaa

SEQ ID NO: 39566 - DNA, 20 bp, Artificial Sequence
  chemically synthesized
acaactcttcctggaaaaga

SEQ ID NO: 39567 - DNA, 20 bp, Artificial Sequence
  chemically synthesized
ctggaaaagagagttcaaat

SEQ ID NO: 39568 - DNA, 20 bp, Artificial Sequence
  chemically synthesized
aagagagttcaaatgagaaa

SEQ ID NO: 39569 - DNA, 20 bp, Artificial Sequence
  chemically synthesized
agttcaaatgagaaacagtg

SEQ ID NO: 39570 - DNA, 20 bp, Artificial Sequence
  chemically synthesized
gttcaaatgagaaacagtgc

SEQ ID NO: 39571 - DNA, 20 bp, Artificial Sequence
  chemically synthesized
ttcaaatgagaaacagtgcg

SEQ ID NO: 39572 - DNA, 20 bp, Artificial Sequence
  chemically synthesized
atgagaaacagtgcggggtg

SEQ ID NO: 39573 - DNA, 20 bp, Artificial Sequence
  chemically synthesized
aacagtgcggggtgaagaca

SEQ ID NO: 39574 - DNA, 20 bp, Artificial Sequence
  chemically synthesized
gcggggtgaagacatggata

SEQ ID NO: 39575 - DNA, 20 bp, Artificial Sequence
  chemically synthesized
cggggtgaagacatggatat

SEQ ID NO: 39576 - DNA, 20 bp, Artificial Sequence
  chemically synthesized
gatattttgatatatctatc

SEQ ID NO: 39577 - DNA, 20 bp, Artificial Sequence
  chemically synthesized
tatatctatcaagtgctttt

SEQ ID NO: 39578 - DNA, 20 bp, Artificial Sequence
  chemically synthesized
atctatcaagtgctttttag

SEQ ID NO: 39579 - DNA, 20 bp, Artificial Sequence
  chemically synthesized
tcaagtgctttttagtggat

SEQ ID NO: 39580 - DNA, 20 bp, Artificial Sequence
  chemically synthesized
caagtgctttttagtggatt

SEQ ID NO: 39581 - DNA, 20 bp, Artificial Sequence
  chemically synthesized
gctttttagtggattaggtt

SEQ ID NO: 39582 - DNA, 20 bp, Artificial Sequence
  chemically synthesized
ggattaggttcagaatgcat

SEQ ID NO: 39583 - DNA, 20 bp, Artificial Sequence
  chemically synthesized
ccaatgcctgttcaataatc

SEQ ID NO: 39584 - DNA, 20 bp, Artificial Sequence
  chemically synthesized
tgttcaataatccagttttc

SEQ ID NO: 39585 - DNA, 20 bp, Artificial Sequence
  chemically synthesized
aataatccagttttccagca

SEQ ID NO: 39586 - DNA, 20 bp, Artificial Sequence
  chemically synthesized
taatccagttttccagcata

SEQ ID NO: 39587 - DNA, 20 bp, Artificial Sequence
  chemically synthesized
agcatagagcatattaaatt

SEQ ID NO: 39588 - DNA, 20 bp, Artificial Sequence
  chemically synthesized
gcatagagcatattaaattg

SEQ ID NO: 39589 - DNA, 20 bp, Artificial Sequence
  chemically synthesized
tagagcatattaaattgagg

SEQ ID NO: 39590 - DNA, 20 bp, Artificial Sequence
  chemically synthesized
agagcatattaaattgagga

SEQ ID NO: 39591 - DNA, 20 bp, Artificial Sequence
  chemically synthesized
tattaaattgaggaaggaca

SEQ ID NO: 39592 - DNA, 20 bp, Artificial Sequence
  chemically synthesized
attgaggaaggacaaagtca

SEQ ID NO: 39593 - DNA, 20 bp, Artificial Sequence
  chemically synthesized
tgaggaaggacaaagtcaca

SEQ ID NO: 39594 - DNA, 20 bp, Artificial Sequence
  chemically synthesized
gaggaaggacaaagtcacag

SEQ ID NO: 39595 - DNA, 20 bp, Artificial Sequence
  chemically synthesized
gaaggacaaagtcacagagg

SEQ ID NO: 39596 - DNA, 20 bp, Artificial Sequence
  chemically synthesized
aaggacaaagtcacagaggt

SEQ ID NO: 39597 - DNA, 20 bp, Artificial Sequence
  chemically synthesized
aggacaaagtcacagaggtg

SEQ ID NO: 39598 - DNA, 20 bp, Artificial Sequence
  chemically synthesized
gacaaagtcacagaggtggg

SEQ ID NO: 39599 - DNA, 20 bp, Artificial Sequence
  chemically synthesized
aaagtcacagaggtggggag

SEQ ID NO: 39600 - DNA, 20 bp, Artificial Sequence
  chemically synthesized
aagtcacagaggtggggagc

SEQ ID NO: 39601 - DNA, 20 bp, Artificial Sequence
  chemically synthesized
tcacagaggtggggagcagg

SEQ ID NO: 39602 - DNA, 20 bp, Artificial Sequence
  chemically synthesized
ggtggggagcaggtggactg

SEQ ID NO: 39603 - DNA, 20 bp, Artificial Sequence
  chemically synthesized
ggagcaggtggactgtggcc

SEQ ID NO: 39604 - DNA, 20 bp, Artificial Sequence
  chemically synthesized
gagcaggtggactgtggcca

SEQ ID NO: 39605 - DNA, 20 bp, Artificial Sequence
  chemically synthesized
gccaaggactttgcatgaaa

SEQ ID NO: 39606 - DNA, 20 bp, Artificial Sequence
  chemically synthesized
aggactttgcatgaaacagt

SEQ ID NO: 39607 - DNA, 20 bp, Artificial Sequence
  chemically synthesized
tcctccttgccctgccctca

SEQ ID NO: 39608 - DNA, 20 bp, Artificial Sequence
  chemically synthesized
cctcatggtctgtgtactct

SEQ ID NO: 39609 - DNA, 20 bp, Artificial Sequence
  chemically synthesized
ctcatggtctgtgtactctc

SEQ ID NO: 39610 - DNA, 20 bp, Artificial Sequence
  chemically synthesized
catggtctgtgtactctcag

SEQ ID NO: 39611 - DNA, 20 bp, Artificial Sequence
  chemically synthesized
atggtctgtgtactctcagg

SEQ ID NO: 39612 - DNA, 20 bp, Artificial Sequence
  chemically synthesized
tctgtgtactctcaggaggt

SEQ ID NO: 39613 - DNA, 20 bp, Artificial Sequence
  chemically synthesized
ctgtgtactctcaggaggtc

SEQ ID NO: 39614 - DNA, 20 bp, Artificial Sequence
  chemically synthesized
gtactctcaggaggtcagga

SEQ ID NO: 39615 - DNA, 20 bp, Artificial Sequence
  chemically synthesized
tactctcaggaggtcaggac

SEQ ID NO: 39616 - DNA, 20 bp, Artificial Sequence
  chemically synthesized
aggtcaggacaggcctttct

SEQ ID NO: 39617 - DNA, 20 bp, Artificial Sequence
  chemically synthesized
ggacaggcctttctgagaat

SEQ ID NO: 39618 - DNA, 20 bp, Artificial Sequence
  chemically synthesized
ctgttcatctgcctttctac

SEQ ID NO: 39619 - DNA, 20 bp, Artificial Sequence
  chemically synthesized
ttctactggatacttgtcat

SEQ ID NO: 39620 - DNA, 20 bp, Artificial Sequence
  chemically synthesized
atacaaacacatgttctctg

SEQ ID NO: 39621 - DNA, 20 bp, Artificial Sequence
  chemically synthesized
ctctgcagtgtgtcatcttt

SEQ ID NO: 39622 - DNA, 20 bp, Artificial Sequence
  chemically synthesized
tcccctgaccctgtattccc

SEQ ID NO: 39623 - DNA, 20 bp, Artificial Sequence
  chemically synthesized
cctgaccctgtattccctag

SEQ ID NO: 39624 - DNA, 20 bp, Artificial Sequence
  chemically synthesized
cctagaagtctcgctgcttt

SEQ ID NO: 39625 - DNA, 20 bp, Artificial Sequence
  chemically synthesized
tagaagtctcgctgctttca

SEQ ID NO: 39626 - DNA, 20 bp, Artificial Sequence
  chemically synthesized
agtctcgctgctttcagagc

SEQ ID NO: 39627 - DNA, 20 bp, Artificial Sequence
  chemically synthesized
gtctcgctgctttcagagcc

SEQ ID NO: 39628 - DNA, 20 bp, Artificial Sequence
  chemically synthesized
tgccacccccactgctcttc

SEQ ID NO: 39629 - DNA, 20 bp, Artificial Sequence
  chemically synthesized
taacccactccatctgcatg

SEQ ID NO: 39630 - DNA, 20 bp, Artificial Sequence
  chemically synthesized
ggcccccaccacacccctca

SEQ ID NO: 39631 - DNA, 20 bp, Artificial Sequence
  chemically synthesized
ccccaccacacccctcaaag

SEQ ID NO: 39632 - DNA, 20 bp, Artificial Sequence
  chemically synthesized
ccacacccctcaaagtggtc

SEQ ID NO: 39633 - DNA, 20 bp, Artificial Sequence
  chemically synthesized
cacacccctcaaagtggtca

SEQ ID NO: 39634 - DNA, 20 bp, Artificial Sequence
  chemically synthesized
tgtcctgttgcttaattcca

SEQ ID NO: 39635 - DNA, 20 bp, Artificial Sequence
  chemically synthesized
cctgttgcttaattccatgg

SEQ ID NO: 39636 - DNA, 20 bp, Artificial Sequence
  chemically synthesized
tgcttaattccatggaagct

SEQ ID NO: 39637 - DNA, 20 bp, Artificial Sequence
  chemically synthesized
cttggctatcttcattttat

SEQ ID NO: 39638 - DNA, 20 bp, Artificial Sequence
  chemically synthesized
ttcattttattagcctcttt

SEQ ID NO: 39639 - DNA, 20 bp, Artificial Sequence
  chemically synthesized
aaaatcactacattttgtgc

SEQ ID NO: 39640 - DNA, 20 bp, Artificial Sequence
  chemically synthesized
aatcactacattttgtgcca

SEQ ID NO: 39641 - DNA, 20 bp, Artificial Sequence
  chemically synthesized
actacattttgtgccagaga

SEQ ID NO: 39642 - DNA, 20 bp, Artificial Sequence
  chemically synthesized
tacattttgtgccagagatg

SEQ ID NO: 39643 - DNA, 20 bp, Artificial Sequence
  chemically synthesized
ttttgtgccagagatggagc

SEQ ID NO: 39644 - DNA, 20 bp, Artificial Sequence
  chemically synthesized
agagatggagctggcatctc

SEQ ID NO: 39645 - DNA, 20 bp, Artificial Sequence
  chemically synthesized
gagatggagctggcatctcc

SEQ ID NO: 39646 - DNA, 20 bp, Artificial Sequence
  chemically synthesized
ggagctggcatctccaggct

SEQ ID NO: 39647 - DNA, 20 bp, Artificial Sequence
  chemically synthesized
gctggcatctccaggcttgg

SEQ ID NO: 39648 - DNA, 20 bp, Artificial Sequence
  chemically synthesized
tggcatctccaggcttggaa

SEQ ID NO: 39649 - DNA, 20 bp, Artificial Sequence
  chemically synthesized
ggcatctccaggcttggaag

SEQ ID NO: 39650 - DNA, 20 bp, Artificial Sequence
  chemically synthesized
gcatctccaggcttggaaga

SEQ ID NO: 39651 - DNA, 20 bp, Artificial Sequence
  chemically synthesized
ggcttggaagagggctgctg

SEQ ID NO: 39652 - DNA, 20 bp, Artificial Sequence
  chemically synthesized
ggaagagggctgctgaagct

SEQ ID NO: 39653 - DNA, 20 bp, Artificial Sequence
  chemically synthesized
gagggctgctgaagctcagc

SEQ ID NO: 39654 - DNA, 20 bp, Artificial Sequence
  chemically synthesized
agggctgctgaagctcagcc

SEQ ID NO: 39655 - DNA, 20 bp, Artificial Sequence
  chemically synthesized
gaagctcagccaggtgtcct

SEQ ID NO: 39656 - DNA, 20 bp, Artificial Sequence
  chemically synthesized
aagctcagccaggtgtccta

SEQ ID NO: 39657 - DNA, 20 bp, Artificial Sequence
  chemically synthesized
gctcagccaggtgtcctaag

SEQ ID NO: 39658 - DNA, 20 bp, Artificial Sequence
  chemically synthesized
ccaggtgtcctaaggagcct

SEQ ID NO: 39659 - DNA, 20 bp, Artificial Sequence
  chemically synthesized
caggtgtcctaaggagcctc

SEQ ID NO: 39660 - DNA, 20 bp, Artificial Sequence
  chemically synthesized
tgtcctaaggagcctcagga

SEQ ID NO: 39661 - DNA, 20 bp, Artificial Sequence
  chemically synthesized
gtcctaaggagcctcaggac

SEQ ID NO: 39662 - DNA, 20 bp, Artificial Sequence
  chemically synthesized
tcctaaggagcctcaggaca

SEQ ID NO: 39663 - DNA, 20 bp, Artificial Sequence
  chemically synthesized
cctaaggagcctcaggacag

SEQ ID NO: 39664 - DNA, 20 bp, Artificial Sequence
  chemically synthesized
gcctcaggacaggggatgct

SEQ ID NO: 39665 - DNA, 20 bp, Artificial Sequence
  chemically synthesized
tcaggacaggggatgctcag

SEQ ID NO: 39666 - DNA, 20 bp, Artificial Sequence
  chemically synthesized
gatgctcagtagccttgcaa

SEQ ID NO: 39667 - DNA, 20 bp, Artificial Sequence
  chemically synthesized
atgctcagtagccttgcaat

SEQ ID NO: 39668 - DNA, 20 bp, Artificial Sequence
  chemically synthesized
gtagccttgcaatgggaaca

SEQ ID NO: 39669 - DNA, 20 bp, Artificial Sequence
  chemically synthesized
cttgcaatgggaacacagct

SEQ ID NO: 39670 - DNA, 20 bp, Artificial Sequence
  chemically synthesized
gaacacagctgagccccact

SEQ ID NO: 39671 - DNA, 20 bp, Artificial Sequence
  chemically synthesized
tggccaccctttgccacaac

SEQ ID NO: 39672 - DNA, 20 bp, Artificial Sequence
  chemically synthesized
ggccaccctttgccacaacc

SEQ ID NO: 39673 - DNA, 20 bp, Artificial Sequence
  chemically synthesized
caccctttgccacaaccagg

SEQ ID NO: 39674 - DNA, 20 bp, Artificial Sequence
  chemically synthesized
ctttgccacaaccaggcaga

SEQ ID NO: 39675 - DNA, 20 bp, Artificial Sequence
  chemically synthesized
tgccacaaccaggcagaaag

SEQ ID NO: 39676 - DNA, 20 bp, Artificial Sequence
  chemically synthesized
ggcagaaagcagcttttgaa

SEQ ID NO: 39677 - DNA, 20 bp, Artificial Sequence
  chemically synthesized
tttgaacagatttgttgcct

SEQ ID NO: 39678 - DNA, 20 bp, Artificial Sequence
  chemically synthesized
ttgcctcagatttgatctca

SEQ ID NO: 39679 - DNA, 20 bp, Artificial Sequence
  chemically synthesized
ttgatctcaaagaaaaatcg

SEQ ID NO: 39680 - DNA, 20 bp, Artificial Sequence
  chemically synthesized
tgatctcaaagaaaaatcgt

SEQ ID NO: 39681 - DNA, 20 bp, Artificial Sequence
  chemically synthesized
tctcaaagaaaaatcgtggg

SEQ ID NO: 39682 - DNA, 20 bp, Artificial Sequence
  chemically synthesized
agaaaaatcgtgggcagtat

SEQ ID NO: 39683 - DNA, 20 bp, Artificial Sequence
  chemically synthesized
atcgtgggcagtattggtcc

SEQ ID NO: 39684 - DNA, 20 bp, Artificial Sequence
  chemically synthesized
tcgtgggcagtattggtccc

SEQ ID NO: 39685 - DNA, 20 bp, Artificial Sequence
  chemically synthesized
ttacaatttcctctgaaatc

SEQ ID NO: 39686 - DNA, 20 bp, Artificial Sequence
  chemically synthesized
ctggatgcctatcaacacct

SEQ ID NO: 39687 - DNA, 20 bp, Artificial Sequence
  chemically synthesized
actgaattctccccaactaa

SEQ ID NO: 39688 - DNA, 20 bp, Artificial Sequence
  chemically synthesized
gaattctccccaactaatag

SEQ ID NO: 39689 - DNA, 20 bp, Artificial Sequence
  chemically synthesized
ctaatagtggtgtgtcactg

SEQ ID NO: 39690 - DNA, 20 bp, Artificial Sequence
  chemically synthesized
tagtggtgtgtcactgtagt

SEQ ID NO: 39691 - DNA, 20 bp, Artificial Sequence
  chemically synthesized
gtgtgtcactgtagtaagcc

SEQ ID NO: 39692 - DNA, 20 bp, Artificial Sequence
  chemically synthesized
tagtaagcctagtacaaaaa

SEQ ID NO: 39693 - DNA, 20 bp, Artificial Sequence
  chemically synthesized
tacaaaaatggccttctttg

SEQ ID NO: 39694 - DNA, 20 bp, Artificial Sequence
  chemically synthesized
caaaaatggccttctttgtg

SEQ ID NO: 39695 - DNA, 20 bp, Artificial Sequence
  chemically synthesized
aaaaatggccttctttgtgg

SEQ ID NO: 39696 - DNA, 20 bp, Artificial Sequence
  chemically synthesized
aaatggccttctttgtggag

SEQ ID NO: 39697 - DNA, 20 bp, Artificial Sequence
  chemically synthesized
tttttgcttaatttttgccc

SEQ ID NO: 39698 - DNA, 20 bp, Artificial Sequence
  chemically synthesized
gcttaatttttgcccaagat

SEQ ID NO: 39699 - DNA, 20 bp, Artificial Sequence
  chemically synthesized
cccaagatgagaacataatt

SEQ ID NO: 39700 - DNA, 20 bp, Artificial Sequence
  chemically synthesized
caccaacatttttgtaacta

SEQ ID NO: 39701 - DNA, 20 bp, Artificial Sequence
  chemically synthesized
accaacatttttgtaactaa

SEQ ID NO: 39702 - DNA, 20 bp, Artificial Sequence
  chemically synthesized
caacatttttgtaactaaag

SEQ ID NO: 39703 - DNA, 20 bp, Artificial Sequence
  chemically synthesized
aacatttttgtaactaaagg

SEQ ID NO: 39704 - DNA, 20 bp, Artificial Sequence
  chemically synthesized
acatttttgtaactaaagga

SEQ ID NO: 39705 - DNA, 20 bp, Artificial Sequence
  chemically synthesized
taactaaaggagggaccatt

SEQ ID NO: 39706 - DNA, 20 bp, Artificial Sequence
  chemically synthesized
ctaaaggagggaccattcag

SEQ ID NO: 39707 - DNA, 20 bp, Artificial Sequence
  chemically synthesized
aagatgcttatcaactgtca

SEQ ID NO: 39708 - DNA, 20 bp, Artificial Sequence
  chemically synthesized
cttatcaactgtcaaagtga

SEQ ID NO: 39709 - DNA, 20 bp, Artificial Sequence
  chemically synthesized
acaaccaatgcacatattgt

SEQ ID NO: 39710 - DNA, 20 bp, Artificial Sequence
  chemically synthesized
tattgtaagaaatcaaacaa

SEQ ID NO: 39711 - DNA, 20 bp, Artificial Sequence
  chemically synthesized
gaaatcaaacaatggcctcc

SEQ ID NO: 39712 - DNA, 20 bp, Artificial Sequence
  chemically synthesized
aaatcaaacaatggcctcca

SEQ ID NO: 39713 - DNA, 20 bp, Artificial Sequence
  chemically synthesized
ctccaaggttcatttctaca

SEQ ID NO: 39714 - DNA, 20 bp, Artificial Sequence
  chemically synthesized
tccaaggttcatttctacac

SEQ ID NO: 39715 - DNA, 20 bp, Artificial Sequence
  chemically synthesized
ccaaggttcatttctacaca

SEQ ID NO: 39716 - DNA, 20 bp, Artificial Sequence
  chemically synthesized
gttcatttctacacagggat

SEQ ID NO: 39717 - DNA, 20 bp, Artificial Sequence
  chemically synthesized
catttctacacagggattag

SEQ ID NO: 39718 - DNA, 20 bp, Artificial Sequence
  chemically synthesized
tagcagatcaacatcaatct

SEQ ID NO: 39719 - DNA, 20 bp, Artificial Sequence
  chemically synthesized
caacatcaatcttggcaaca

SEQ ID NO: 39720 - DNA, 20 bp, Artificial Sequence
  chemically synthesized
ggcaacacagttgccactga

SEQ ID NO: 39721 - DNA, 20 bp, Artificial Sequence
  chemically synthesized
ttattttttttatcatgaca

SEQ ID NO: 39722 - DNA, 20 bp, Artificial Sequence
  chemically synthesized
tttatcatgacatggcaatc

SEQ ID NO: 39723 - DNA, 20 bp, Artificial Sequence
  chemically synthesized
tatcatgacatggcaatcaa

SEQ ID NO: 39724 - DNA, 20 bp, Artificial Sequence
  chemically synthesized
aacatgatttattcttattt

SEQ ID NO: 39725 - DNA, 20 bp, Artificial Sequence
  chemically synthesized
tattcttatttaagatttta

SEQ ID NO: 39726 - DNA, 20 bp, Artificial Sequence
  chemically synthesized
cttatttaagattttatggt

SEQ ID NO: 39727 - DNA, 20 bp, Artificial Sequence
  chemically synthesized
ttaagattttatggttagac

SEQ ID NO: 39728 - DNA, 20 bp, Artificial Sequence
  chemically synthesized
taagattttatggttagact

SEQ ID NO: 39729 - DNA, 20 bp, Artificial Sequence
  chemically synthesized
gattttatggttagactagg

SEQ ID NO: 39730 - DNA, 20 bp, Artificial Sequence
  chemically synthesized
ttatggttagactaggcaga

SEQ ID NO: 39731 - DNA, 20 bp, Artificial Sequence
  chemically synthesized
ggttagactaggcagatagc

SEQ ID NO: 39732 - DNA, 20 bp, Artificial Sequence
  chemically synthesized
ctaggcagatagctagatat

SEQ ID NO: 39733 - DNA, 20 bp, Artificial Sequence
  chemically synthesized
ggcagatagctagatatgag

SEQ ID NO: 39734 - DNA, 20 bp, Artificial Sequence
  chemically synthesized
gcagatagctagatatgagc

SEQ ID NO: 39735 - DNA, 20 bp, Artificial Sequence
  chemically synthesized
agatagctagatatgagcag

SEQ ID NO: 39736 - DNA, 20 bp, Artificial Sequence
  chemically synthesized
gatagctagatatgagcagg

SEQ ID NO: 39737 - DNA, 20 bp, Artificial Sequence
  chemically synthesized
agctagatatgagcaggagg

SEQ ID NO: 39738 - DNA, 20 bp, Artificial Sequence
  chemically synthesized
tagatatgagcaggaggtgg

SEQ ID NO: 39739 - DNA, 20 bp, Artificial Sequence
  chemically synthesized
agcaggaggtggaagcccct

SEQ ID NO: 39740 - DNA, 20 bp, Artificial Sequence
  chemically synthesized
caggaggtggaagcccctga

SEQ ID NO: 39741 - DNA, 20 bp, Artificial Sequence
  chemically synthesized
ggtggaagcccctgagagaa

SEQ ID NO: 39742 - DNA, 20 bp, Artificial Sequence
  chemically synthesized
tggaagcccctgagagaatg

SEQ ID NO: 39743 - DNA, 20 bp, Artificial Sequence
  chemically synthesized
ggaagcccctgagagaatgg

SEQ ID NO: 39744 - DNA, 20 bp, Artificial Sequence
  chemically synthesized
cccctgagagaatggaggtc

SEQ ID NO: 39745 - DNA, 20 bp, Artificial Sequence
  chemically synthesized
cctgagagaatggaggtctg

SEQ ID NO: 39746 - DNA, 20 bp, Artificial Sequence
  chemically synthesized
gtctggagaatctgaaaccc

SEQ ID NO: 39747 - DNA, 20 bp, Artificial Sequence
  chemically synthesized
ctggagaatctgaaacccca

SEQ ID NO: 39748 - DNA, 20 bp, Artificial Sequence
  chemically synthesized
tgaaaccccagagattaccc

SEQ ID NO: 39749 - DNA, 20 bp, Artificial Sequence
  chemically synthesized
attacccaagtcctgcatgc

SEQ ID NO: 39750 - DNA, 20 bp, Artificial Sequence
  chemically synthesized
aagtcctgcatgctagacat

SEQ ID NO: 39751 - DNA, 20 bp, Artificial Sequence
  chemically synthesized
tcctgcatgctagacatgag

SEQ ID NO: 39752 - DNA, 20 bp, Artificial Sequence
  chemically synthesized
ctgcatgctagacatgagtg

SEQ ID NO: 39753 - DNA, 20 bp, Artificial Sequence
  chemically synthesized
tgcatgctagacatgagtgg

SEQ ID NO: 39754 - DNA, 20 bp, Artificial Sequence
  chemically synthesized
catgctagacatgagtggag

SEQ ID NO: 39755 - DNA, 20 bp, Artificial Sequence
  chemically synthesized
atgctagacatgagtggagg

SEQ ID NO: 39756 - DNA, 20 bp, Artificial Sequence
  chemically synthesized
tgctagacatgagtggagga

SEQ ID NO: 39757 - DNA, 20 bp, Artificial Sequence
  chemically synthesized
gctagacatgagtggaggag

SEQ ID NO: 39758 - DNA, 20 bp, Artificial Sequence
  chemically synthesized
ctagacatgagtggaggagg

SEQ ID NO: 39759 - DNA, 20 bp, Artificial Sequence
  chemically synthesized
agtggaggagggggaatacc

SEQ ID NO: 39760 - DNA, 20 bp, Artificial Sequence
  chemically synthesized
gtggaggagggggaatacct

SEQ ID NO: 39761 - DNA, 20 bp, Artificial Sequence
  chemically synthesized
gaggagggggaatacctagg

SEQ ID NO: 39762 - DNA, 20 bp, Artificial Sequence
  chemically synthesized
gggggaatacctaggtagaa

SEQ ID NO: 39763 - DNA, 20 bp, Artificial Sequence
  chemically synthesized
ggtagaaaagaatgcccctt

SEQ ID NO: 39764 - DNA, 20 bp, Artificial Sequence
  chemically synthesized
agaatgccccttaagatgcc

SEQ ID NO: 39765 - DNA, 20 bp, Artificial Sequence
  chemically synthesized
atgccccttaagatgcccag

SEQ ID NO: 39766 - DNA, 20 bp, Artificial Sequence
  chemically synthesized
cccagcagtcgctcactgtg

SEQ ID NO: 39767 - DNA, 20 bp, Artificial Sequence
  chemically synthesized
tcactgtgcagttaactttt

SEQ ID NO: 39768 - DNA, 20 bp, Artificial Sequence
  chemically synthesized
ttaacttttcagaatgctgc

SEQ ID NO: 39769 - DNA, 20 bp, Artificial Sequence
  chemically synthesized
tgctgctagatacatgctga

SEQ ID NO: 39770 - DNA, 20 bp, Artificial Sequence
  chemically synthesized
gctgctagatacatgctgat

SEQ ID NO: 39771 - DNA, 20 bp, Artificial Sequence
  chemically synthesized
ctgctagatacatgctgata

SEQ ID NO: 39772 - DNA, 20 bp, Artificial Sequence
  chemically synthesized
gctagatacatgctgatagg

SEQ ID NO: 39773 - DNA, 20 bp, Artificial Sequence
  chemically synthesized
ctagatacatgctgataggg

SEQ ID NO: 39774 - DNA, 20 bp, Artificial Sequence
  chemically synthesized
tagatacatgctgataggga

SEQ ID NO: 39775 - DNA, 20 bp, Artificial Sequence
  chemically synthesized
atacatgctgatagggaggg

SEQ ID NO: 39776 - DNA, 20 bp, Artificial Sequence
  chemically synthesized
acatgctgatagggagggaa

SEQ ID NO: 39777 - DNA, 20 bp, Artificial Sequence
  chemically synthesized
catgctgatagggagggaag

SEQ ID NO: 39778 - DNA, 20 bp, Artificial Sequence
  chemically synthesized
atgctgatagggagggaaga

SEQ ID NO: 39779 - DNA, 20 bp, Artificial Sequence
  chemically synthesized
gatagggagggaagagggca

SEQ ID NO: 39780 - DNA, 20 bp, Artificial Sequence
  chemically synthesized
atagggagggaagagggcaa

SEQ ID NO: 39781 - DNA, 20 bp, Artificial Sequence
  chemically synthesized
agggagggaagagggcaaag

SEQ ID NO: 39782 - DNA, 20 bp, Artificial Sequence
  chemically synthesized
agggcaaaggagaaattcct

SEQ ID NO: 39783 - DNA, 20 bp, Artificial Sequence
  chemically synthesized
ggcaaaggagaaattcctaa

SEQ ID NO: 39784 - DNA, 20 bp, Artificial Sequence
  chemically synthesized
agaaattcctaagagataca

SEQ ID NO: 39785 - DNA, 20 bp, Artificial Sequence
  chemically synthesized
tcctaagagatacacggttg

SEQ ID NO: 39786 - DNA, 20 bp, Artificial Sequence
  chemically synthesized
aagagatacacggttgcagt

SEQ ID NO: 39787 - DNA, 20 bp, Artificial Sequence
  chemically synthesized
gttgcagttagtatacatct

SEQ ID NO: 39788 - DNA, 20 bp, Artificial Sequence
  chemically synthesized
gagtgctatacaaccttctt

SEQ ID NO: 39789 - DNA, 20 bp, Artificial Sequence
  chemically synthesized
agtgctatacaaccttcttt

SEQ ID NO: 39790 - DNA, 20 bp, Artificial Sequence
  chemically synthesized
gctatacaaccttctttggg

SEQ ID NO: 39791 - DNA, 20 bp, Artificial Sequence
  chemically synthesized
atacaaccttctttgggtgg

SEQ ID NO: 39792 - DNA, 20 bp, Artificial Sequence
  chemically synthesized
aaccttctttgggtggtggc

SEQ ID NO: 39793 - DNA, 20 bp, Artificial Sequence
  chemically synthesized
cttctttgggtggtggcaag

SEQ ID NO: 39794 - DNA, 20 bp, Artificial Sequence
  chemically synthesized
ggtggtggcaagaagcaatg

SEQ ID NO: 39795 - DNA, 20 bp, Artificial Sequence
  chemically synthesized
gaagcaatgcagccattacg

SEQ ID NO: 39796 - DNA, 20 bp, Artificial Sequence
  chemically synthesized
catatcaaacacctgtatca

SEQ ID NO: 39797 - DNA, 20 bp, Artificial Sequence
  chemically synthesized
atatcaaacacctgtatcac

SEQ ID NO: 39798 - DNA, 20 bp, Artificial Sequence
  chemically synthesized
cacctgtatcacaggtgtta

SEQ ID NO: 39799 - DNA, 20 bp, Artificial Sequence
  chemically synthesized
atcacaggtgttaaagaaac

SEQ ID NO: 39800 - DNA, 20 bp, Artificial Sequence
  chemically synthesized
atgatttgcaatattgtctt

SEQ ID NO: 39801 - DNA, 20 bp, Artificial Sequence
  chemically synthesized
ctataaatatgatttttaaa

SEQ ID NO: 39802 - DNA, 20 bp, Artificial Sequence
  chemically synthesized
atttttaaaaagtatttctt

SEQ ID NO: 39803 - DNA, 20 bp, Artificial Sequence
  chemically synthesized
tttttaaaaagtatttcttt

SEQ ID NO: 39804 - DNA, 20 bp, Artificial Sequence
  chemically synthesized
taaaaagtatttctttaggt

SEQ ID NO: 39805 - DNA, 20 bp, Artificial Sequence
  chemically synthesized
tacgcattgacttatcttcc

SEQ ID NO: 39806 - DNA, 20 bp, Artificial Sequence
  chemically synthesized
acgcattgacttatcttcct

SEQ ID NO: 39807 - DNA, 20 bp, Artificial Sequence
  chemically synthesized
cttatcttcctgggtttcat

SEQ ID NO: 39808 - DNA, 20 bp, Artificial Sequence
  chemically synthesized
actgtttatctcaaactctt

SEQ ID NO: 39809 - DNA, 20 bp, Artificial Sequence
  chemically synthesized
atctcaaactcttgagatta

SEQ ID NO: 39810 - DNA, 20 bp, Artificial Sequence
  chemically synthesized
aaactcttgagattaaagta

SEQ ID NO: 39811 - DNA, 20 bp, Artificial Sequence
  chemically synthesized
aactcttgagattaaagtat

SEQ ID NO: 39812 - DNA, 20 bp, Artificial Sequence
  chemically synthesized
ttgagattaaagtatgggct

SEQ ID NO: 39813 - DNA, 20 bp, Artificial Sequence
  chemically synthesized
tgagattaaagtatgggctc

SEQ ID NO: 39814 - DNA, 20 bp, Artificial Sequence
  chemically synthesized
agattaaagtatgggctcag

SEQ ID NO: 39815 - DNA, 20 bp, Artificial Sequence
  chemically synthesized
gattaaagtatgggctcagg

SEQ ID NO: 39816 - DNA, 20 bp, Artificial Sequence
  chemically synthesized
attaaagtatgggctcagga

SEQ ID NO: 39817 - DNA, 20 bp, Artificial Sequence
  chemically synthesized
taaagtatgggctcaggagg

SEQ ID NO: 39818 - DNA, 20 bp, Artificial Sequence
  chemically synthesized
gtatgggctcaggagggagc

SEQ ID NO: 39819 - DNA, 20 bp, Artificial Sequence
  chemically synthesized
tatgggctcaggagggagcg

SEQ ID NO: 39820 - DNA, 20 bp, Artificial Sequence
  chemically synthesized
tgggctcaggagggagcgag

SEQ ID NO: 39821 - DNA, 20 bp, Artificial Sequence
  chemically synthesized
caggagggagcgaggagctt

SEQ ID NO: 39822 - DNA, 20 bp, Artificial Sequence
  chemically synthesized
aggagggagcgaggagcttc

SEQ ID NO: 39823 - DNA, 20 bp, Artificial Sequence
  chemically synthesized
gaggagcttcaggactctca

SEQ ID NO: 39824 - DNA, 20 bp, Artificial Sequence
  chemically synthesized
tcaggactctcacggacctc

SEQ ID NO: 39825 - DNA, 20 bp, Artificial Sequence
  chemically synthesized
actctcacggacctccagca

SEQ ID NO: 39826 - DNA, 20 bp, Artificial Sequence
  chemically synthesized
cacggacctccagcacagtg

SEQ ID NO: 39827 - DNA, 20 bp, Artificial Sequence
  chemically synthesized
agcacagtgtagctgcctta

SEQ ID NO: 39828 - DNA, 20 bp, Artificial Sequence
  chemically synthesized
agtgtagctgccttatggaa

SEQ ID NO: 39829 - DNA, 20 bp, Artificial Sequence
  chemically synthesized
gtagctgccttatggaaaag

SEQ ID NO: 39830 - DNA, 20 bp, Artificial Sequence
  chemically synthesized
ggccacactgttttctgcac

SEQ ID NO: 39831 - DNA, 20 bp, Artificial Sequence
  chemically synthesized
ctgcccctactattcctcac

SEQ ID NO: 39832 - DNA, 20 bp, Artificial Sequence
  chemically synthesized
tgcccctactattcctcact

SEQ ID NO: 39833 - DNA, 20 bp, Artificial Sequence
  chemically synthesized
ccctactattcctcactggg

SEQ ID NO: 39834 - DNA, 20 bp, Artificial Sequence
  chemically synthesized
ctactattcctcactgggca

SEQ ID NO: 39835 - DNA, 20 bp, Artificial Sequence
  chemically synthesized
attcctcactgggcagagca

SEQ ID NO: 39836 - DNA, 20 bp, Artificial Sequence
  chemically synthesized
tgggcagagcacagccaccc

SEQ ID NO: 39837 - DNA, 20 bp, Artificial Sequence
  chemically synthesized
ctggccctgcctgaacattt

SEQ ID NO: 39838 - DNA, 20 bp, Artificial Sequence
  chemically synthesized
ccctgcctgaacattttagt

SEQ ID NO: 39839 - DNA, 20 bp, Artificial Sequence
  chemically synthesized
ctgaacattttagtcagtgt

SEQ ID NO: 39840 - DNA, 20 bp, Artificial Sequence
  chemically synthesized
gtgttggctctgtgcttctc

SEQ ID NO: 39841 - DNA, 20 bp, Artificial Sequence
  chemically synthesized
tgttggctctgtgcttctct

SEQ ID NO: 39842 - DNA, 20 bp, Artificial Sequence
  chemically synthesized
gttggctctgtgcttctctg

SEQ ID NO: 39843 - DNA, 20 bp, Artificial Sequence
  chemically synthesized
tggctctgtgcttctctggg

SEQ ID NO: 39844 - DNA, 20 bp, Artificial Sequence
  chemically synthesized
ggctctgtgcttctctgggg

SEQ ID NO: 39845 - DNA, 20 bp, Artificial Sequence
  chemically synthesized
cttctctggggaggaaatcc

SEQ ID NO: 39846 - DNA, 20 bp, Artificial Sequence
  chemically synthesized
tctctggggaggaaatccaa

SEQ ID NO: 39847 - DNA, 20 bp, Artificial Sequence
  chemically synthesized
gaaatccaagagacaaccca

SEQ ID NO: 39848 - DNA, 20 bp, Artificial Sequence
  chemically synthesized
ccacagcccctctgccattt

SEQ ID NO: 39849 - DNA, 20 bp, Artificial Sequence
  chemically synthesized
cccctctgccatttcagctg

SEQ ID NO: 39850 - DNA, 20 bp, Artificial Sequence
  chemically synthesized
ctctgccatttcagctgcag

SEQ ID NO: 39851 - DNA, 20 bp, Artificial Sequence
  chemically synthesized
agtaccaccgttaatgccct

SEQ ID NO: 39852 - DNA, 20 bp, Artificial Sequence
  chemically synthesized
gtaccaccgttaatgccctt

SEQ ID NO: 39853 - DNA, 20 bp, Artificial Sequence
  chemically synthesized
ccgttaatgcccttgggctt

SEQ ID NO: 39854 - DNA, 20 bp, Artificial Sequence
  chemically synthesized
taatgcccttgggcttgaga

SEQ ID NO: 39855 - DNA, 20 bp, Artificial Sequence
  chemically synthesized
tgcccttgggcttgagaaag

SEQ ID NO: 39856 - DNA, 20 bp, Artificial Sequence
  chemically synthesized
gcccttgggcttgagaaaga

SEQ ID NO: 39857 - DNA, 20 bp, Artificial Sequence
  chemically synthesized
cccttgggcttgagaaagaa

SEQ ID NO: 39858 - DNA, 20 bp, Artificial Sequence
  chemically synthesized
ggcttgagaaagaagggacc

SEQ ID NO: 39859 - DNA, 20 bp, Artificial Sequence
  chemically synthesized
ggccacttccctgacacctc

SEQ ID NO: 39860 - DNA, 20 bp, Artificial Sequence
  chemically synthesized
tccctgacacctccagcaca

SEQ ID NO: 39861 - DNA, 20 bp, Artificial Sequence
  chemically synthesized
ctgacacctccagcacacag

SEQ ID NO: 39862 - DNA, 20 bp, Artificial Sequence
  chemically synthesized
tgacacctccagcacacagc

SEQ ID NO: 39863 - DNA, 20 bp, Artificial Sequence
  chemically synthesized
gacacctccagcacacagca

SEQ ID NO: 39864 - DNA, 20 bp, Artificial Sequence
  chemically synthesized
cctccagcacacagcaggga

SEQ ID NO: 39865 - DNA, 20 bp, Artificial Sequence
  chemically synthesized
acacagcagggaaagaattc

SEQ ID NO: 39866 - DNA, 20 bp, Artificial Sequence
  chemically synthesized
ttccagtttctctttcttgt

SEQ ID NO: 39867 - DNA, 20 bp, Artificial Sequence
  chemically synthesized
tttcacctgctactcttcac

SEQ ID NO: 39868 - DNA, 20 bp, Artificial Sequence
  chemically synthesized
ttcacctgctactcttcacc

SEQ ID NO: 39869 - DNA, 20 bp, Artificial Sequence
  chemically synthesized
cctgctactcttcaccaggc

SEQ ID NO: 39870 - DNA, 20 bp, Artificial Sequence
  chemically synthesized
ctgctactcttcaccaggca

SEQ ID NO: 39871 - DNA, 20 bp, Artificial Sequence
  chemically synthesized
tcttcaccaggcaaggctcc

SEQ ID NO: 39872 - DNA, 20 bp, Artificial Sequence
  chemically synthesized
accaggcaaggctcctggct

SEQ ID NO: 39873 - DNA, 20 bp, Artificial Sequence
  chemically synthesized
ccaggcaaggctcctggctt

SEQ ID NO: 39874 - DNA, 20 bp, Artificial Sequence
  chemically synthesized
aggctcctggcttgggccca

SEQ ID NO: 39875 - DNA, 20 bp, Artificial Sequence
  chemically synthesized
cctggcttgggcccacagtg

SEQ ID NO: 39876 - DNA, 20 bp, Artificial Sequence
  chemically synthesized
ctggcttgggcccacagtgc

SEQ ID NO: 39877 - DNA, 20 bp, Artificial Sequence
  chemically synthesized
cagtgcaggcacctcgaact

SEQ ID NO: 39878 - DNA, 20 bp, Artificial Sequence
  chemically synthesized
actcagttgaacatttccac

SEQ ID NO: 39879 - DNA, 20 bp, Artificial Sequence
  chemically synthesized
ggctgcactctgtgtttttg

SEQ ID NO: 39880 - DNA, 20 bp, Artificial Sequence
  chemically synthesized
gctgcactctgtgtttttgt

SEQ ID NO: 39881 - DNA, 20 bp, Artificial Sequence
  chemically synthesized
ctgcactctgtgtttttgtg

SEQ ID NO: 39882 - DNA, 20 bp, Artificial Sequence
  chemically synthesized
ctctgtgtttttgtggggtg

SEQ ID NO: 39883 - DNA, 20 bp, Artificial Sequence
  chemically synthesized
tttttgtggggtgaagctcc

SEQ ID NO: 39884 - DNA, 20 bp, Artificial Sequence
  chemically synthesized
tttgtggggtgaagctccca

SEQ ID NO: 39885 - DNA, 20 bp, Artificial Sequence
  chemically synthesized
ttgtggggtgaagctcccag

SEQ ID NO: 39886 - DNA, 20 bp, Artificial Sequence
  chemically synthesized
aagctcccagaggtgactga

SEQ ID NO: 39887 - DNA, 20 bp, Artificial Sequence
  chemically synthesized
tccttctgccactaacactg

SEQ ID NO: 39888 - DNA, 20 bp, Artificial Sequence
  chemically synthesized
catactgcccttgctgtact

SEQ ID NO: 39889 - DNA, 20 bp, Artificial Sequence
  chemically synthesized
tgcccttgctgtacttggac

SEQ ID NO: 39890 - DNA, 20 bp, Artificial Sequence
  chemically synthesized
gcccttgctgtacttggact

SEQ ID NO: 39891 - DNA, 20 bp, Artificial Sequence
  chemically synthesized
cccttgctgtacttggacta

SEQ ID NO: 39892 - DNA, 20 bp, Artificial Sequence
  chemically synthesized
ttgctgtacttggactaggg

SEQ ID NO: 39893 - DNA, 20 bp, Artificial Sequence
  chemically synthesized
tgctgtacttggactaggga

SEQ ID NO: 39894 - DNA, 20 bp, Artificial Sequence
  chemically synthesized
cttggactagggaaggaaaa

SEQ ID NO: 39895 - DNA, 20 bp, Artificial Sequence
  chemically synthesized
agggaaggaaaaaagatcct

SEQ ID NO: 39896 - DNA, 20 bp, Artificial Sequence
  chemically synthesized
tgagtgctttactcacaccc

SEQ ID NO: 39897 - DNA, 20 bp, Artificial Sequence
  chemically synthesized
actcacaccccagtgtgccc

SEQ ID NO: 39898 - DNA, 20 bp, Artificial Sequence
  chemically synthesized
agtgtgccccagccacccta

SEQ ID NO: 39899 - DNA, 20 bp, Artificial Sequence
  chemically synthesized
gccccagccaccctatggaa

SEQ ID NO: 39900 - DNA, 20 bp, Artificial Sequence
  chemically synthesized
cccagccaccctatggaaaa

SEQ ID NO: 39901 - DNA, 20 bp, Artificial Sequence
  chemically synthesized
ccagccaccctatggaaaag

SEQ ID NO: 39902 - DNA, 20 bp, Artificial Sequence
  chemically synthesized
ccaccctatggaaaagaggc

SEQ ID NO: 39903 - DNA, 20 bp, Artificial Sequence
  chemically synthesized
ggccagtgtgtcatccctgc

SEQ ID NO: 39904 - DNA, 20 bp, Artificial Sequence
  chemically synthesized
gtcatccctgcaagcaccct

SEQ ID NO: 39905 - DNA, 20 bp, Artificial Sequence
  chemically synthesized
tcatccctgcaagcaccctg

SEQ ID NO: 39906 - DNA, 20 bp, Artificial Sequence
  chemically synthesized
cccctgcccctgctgccccc

SEQ ID NO: 39907 - DNA, 20 bp, Artificial Sequence
  chemically synthesized
cccctgctgcccccaagctg

SEQ ID NO: 39908 - DNA, 20 bp, Artificial Sequence
  chemically synthesized
cctgctgcccccaagctgta

SEQ ID NO: 39909 - DNA, 20 bp, Artificial Sequence
  chemically synthesized
ctgcccccaagctgtagagc

SEQ ID NO: 39910 - DNA, 20 bp, Artificial Sequence
  chemically synthesized
agctgtagagccagaatata

SEQ ID NO: 39911 - DNA, 20 bp, Artificial Sequence
  chemically synthesized
gtagagccagaatataaagc

SEQ ID NO: 39912 - DNA, 20 bp, Artificial Sequence
  chemically synthesized
gagccagaatataaagctgg

SEQ ID NO: 39913 - DNA, 20 bp, Artificial Sequence
  chemically synthesized
agctggcagaaaaatgtaaa

SEQ ID NO: 39914 - DNA, 20 bp, Artificial Sequence
  chemically synthesized
gctggcagaaaaatgtaaaa

SEQ ID NO: 39915 - DNA, 20 bp, Artificial Sequence
  chemically synthesized
gcagaaaaatgtaaaaaggc

SEQ ID NO: 39916 - DNA, 20 bp, Artificial Sequence
  chemically synthesized
aaaatgtaaaaaggctagac

SEQ ID NO: 39917 - DNA, 20 bp, Artificial Sequence
  chemically synthesized
gtaaaaaggctagactggct

SEQ ID NO: 39918 - DNA, 20 bp, Artificial Sequence
  chemically synthesized
gctagactggcttagcctcc

SEQ ID NO: 39919 - DNA, 20 bp, Artificial Sequence
  chemically synthesized
cctacatctttctcctgtgc

SEQ ID NO: 39920 - DNA, 20 bp, Artificial Sequence
  chemically synthesized
tccttcctgctcttgaacat

SEQ ID NO: 39921 - DNA, 20 bp, Artificial Sequence
  chemically synthesized
gctcttgaacatcggactcc

SEQ ID NO: 39922 - DNA, 20 bp, Artificial Sequence
  chemically synthesized
acatcggactccaagttctt

SEQ ID NO: 39923 - DNA, 20 bp, Artificial Sequence
  chemically synthesized
gactccaagttcttcagctg

SEQ ID NO: 39924 - DNA, 20 bp, Artificial Sequence
  chemically synthesized
actccaagttcttcagctgt

SEQ ID NO: 39925 - DNA, 20 bp, Artificial Sequence
  chemically synthesized
agttcttcagctgtgggact

SEQ ID NO: 39926 - DNA, 20 bp, Artificial Sequence
  chemically synthesized
ggactgtcttccttgctcct

SEQ ID NO: 39927 - DNA, 20 bp, Artificial Sequence
  chemically synthesized
cttccttgctcctcagattg

SEQ ID NO: 39928 - DNA, 20 bp, Artificial Sequence
  chemically synthesized
ttccttgctcctcagattgc

SEQ ID NO: 39929 - DNA, 20 bp, Artificial Sequence
  chemically synthesized
cttgctcctcagattgcagg

SEQ ID NO: 39930 - DNA, 20 bp, Artificial Sequence
  chemically synthesized
agattgcaggtggcctatta

SEQ ID NO: 39931 - DNA, 20 bp, Artificial Sequence
  chemically synthesized
gattgcaggtggcctattat

SEQ ID NO: 39932 - DNA, 20 bp, Artificial Sequence
  chemically synthesized
atgggaccttgtaatcttgt

SEQ ID NO: 39933 - DNA, 20 bp, Artificial Sequence
  chemically synthesized
gtgagttaataccacttaat

SEQ ID NO: 39934 - DNA, 20 bp, Artificial Sequence
  chemically synthesized
taataagctcccctttgtgt

SEQ ID NO: 39935 - DNA, 20 bp, Artificial Sequence
  chemically synthesized
tgtgagtatatctatatcta

SEQ ID NO: 39936 - DNA, 20 bp, Artificial Sequence
  chemically synthesized
agtatatctatatctataga

SEQ ID NO: 39937 - DNA, 20 bp, Artificial Sequence
  chemically synthesized
tctatatctatagatagata

SEQ ID NO: 39938 - DNA, 20 bp, Artificial Sequence
  chemically synthesized
ctatatctatagatagatat

SEQ ID NO: 39939 - DNA, 20 bp, Artificial Sequence
  chemically synthesized
atatatatataatctcctat

SEQ ID NO: 39940 - DNA, 20 bp, Artificial Sequence
  chemically synthesized
tcctattagttctgtccctc

SEQ ID NO: 39941 - DNA, 20 bp, Artificial Sequence
  chemically synthesized
ctattagttctgtccctcta

SEQ ID NO: 39942 - DNA, 20 bp, Artificial Sequence
  chemically synthesized
ctagagaaccccgactaata

SEQ ID NO: 39943 - DNA, 20 bp, Artificial Sequence
  chemically synthesized
actaatacagattttcatac

SEQ ID NO: 39944 - DNA, 20 bp, Artificial Sequence
  chemically synthesized
aatacagattttcataccag

SEQ ID NO: 39945 - DNA, 20 bp, Artificial Sequence
  chemically synthesized
acagattttcataccagaag

SEQ ID NO: 39946 - DNA, 20 bp, Artificial Sequence
  chemically synthesized
tcataccagaagtggttctt

SEQ ID NO: 39947 - DNA, 20 bp, Artificial Sequence
  chemically synthesized
cataccagaagtggttcttg

SEQ ID NO: 39948 - DNA, 20 bp, Artificial Sequence
  chemically synthesized
cagaagtggttcttgaggaa

SEQ ID NO: 39949 - DNA, 20 bp, Artificial Sequence
  chemically synthesized
ttcttgaggaacagaatatt

SEQ ID NO: 39950 - DNA, 20 bp, Artificial Sequence
  chemically synthesized
tcttgaggaacagaatatta

SEQ ID NO: 39951 - DNA, 20 bp, Artificial Sequence
  chemically synthesized
gaggaacagaatattaagga

SEQ ID NO: 39952 - DNA, 20 bp, Artificial Sequence
  chemically synthesized
taaggatggaattctttcat

SEQ ID NO: 39953 - DNA, 20 bp, Artificial Sequence
  chemically synthesized
tggaattctttcattggttt

SEQ ID NO: 39954 - DNA, 20 bp, Artificial Sequence
  chemically synthesized
ggaattctttcattggtttt

SEQ ID NO: 39955 - DNA, 20 bp, Artificial Sequence
  chemically synthesized
ttcattggttttgggacttc

SEQ ID NO: 39956 - DNA, 20 bp, Artificial Sequence
  chemically synthesized
ggttttgggacttctggtgt

SEQ ID NO: 39957 - DNA, 20 bp, Artificial Sequence
  chemically synthesized
tgttggctgattaatatgat

SEQ ID NO: 39958 - DNA, 20 bp, Artificial Sequence
  chemically synthesized
tgattagaccaaaaaatgct

SEQ ID NO: 39959 - DNA, 20 bp, Artificial Sequence
  chemically synthesized
gattagaccaaaaaatgcta

SEQ ID NO: 39960 - DNA, 20 bp, Artificial Sequence
  chemically synthesized
gctaaggactctacttctaa

SEQ ID NO: 39961 - DNA, 20 bp, Artificial Sequence
  chemically synthesized
ggactctacttctaatagta

SEQ ID NO: 39962 - DNA, 20 bp, Artificial Sequence
  chemically synthesized
actctacttctaatagtatg

SEQ ID NO: 39963 - DNA, 20 bp, Artificial Sequence
  chemically synthesized
aatagtatggagaacactga

SEQ ID NO: 39964 - DNA, 20 bp, Artificial Sequence
  chemically synthesized
tggagaacactgatagtact

SEQ ID NO: 39965 - DNA, 20 bp, Artificial Sequence
  chemically synthesized
agtacttggcctgaattgtt

SEQ ID NO: 39966 - DNA, 20 bp, Artificial Sequence
  chemically synthesized
tacttggcctgaattgttta

SEQ ID NO: 39967 - DNA, 20 bp, Artificial Sequence
  chemically synthesized
cttggcctgaattgtttaga

SEQ ID NO: 39968 - DNA, 20 bp, Artificial Sequence
  chemically synthesized
actactgattcatcacttat

SEQ ID NO: 39969 - DNA, 20 bp, Artificial Sequence
  chemically synthesized
tactgattcatcacttatga

SEQ ID NO: 39970 - DNA, 20 bp, Artificial Sequence
  chemically synthesized
actgattcatcacttatgag

SEQ ID NO: 39971 - DNA, 20 bp, Artificial Sequence
  chemically synthesized
attcatcacttatgagaggc

SEQ ID NO: 39972 - DNA, 20 bp, Artificial Sequence
  chemically synthesized
ttcatcacttatgagaggca

SEQ ID NO: 39973 - DNA, 20 bp, Artificial Sequence
  chemically synthesized
catcacttatgagaggcaag

SEQ ID NO: 39974 - DNA, 20 bp, Artificial Sequence
  chemically synthesized
cttatgagaggcaaggagtt

SEQ ID NO: 39975 - DNA, 20 bp, Artificial Sequence
  chemically synthesized
ataatacctttgactatatg

SEQ ID NO: 39976 - DNA, 20 bp, Artificial Sequence
  chemically synthesized
aatacctttgactatatgtg

SEQ ID NO: 39977 - DNA, 20 bp, Artificial Sequence
  chemically synthesized
ttgactatatgtggagaacc

SEQ ID NO: 39978 - DNA, 20 bp, Artificial Sequence
  chemically synthesized
tgactatatgtggagaacca

SEQ ID NO: 39979 - DNA, 20 bp, Artificial Sequence
  chemically synthesized
gagaaccaaggaacataatg

SEQ ID NO: 39980 - DNA, 20 bp, Artificial Sequence
  chemically synthesized
accaaggaacataatgaagt

SEQ ID NO: 39981 - DNA, 20 bp, Artificial Sequence
  chemically synthesized
gaagttggttgattgctcct

SEQ ID NO: 39982 - DNA, 20 bp, Artificial Sequence
  chemically synthesized
ttgattgctcctaagttctc

SEQ ID NO: 39983 - DNA, 20 bp, Artificial Sequence
  chemically synthesized
gattgctcctaagttctctg

SEQ ID NO: 39984 - DNA, 20 bp, Artificial Sequence
  chemically synthesized
gctcctaagttctctggaga

SEQ ID NO: 39985 - DNA, 20 bp, Artificial Sequence
  chemically synthesized
tcctaagttctctggagaaa

SEQ ID NO: 39986 - DNA, 20 bp, Artificial Sequence
  chemically synthesized
ttctctggagaaagagatga

SEQ ID NO: 39987 - DNA, 20 bp, Artificial Sequence
  chemically synthesized
atgaaagaaaatgatgatct

SEQ ID NO: 39988 - DNA, 20 bp, Artificial Sequence
  chemically synthesized
tgaaagaaaatgatgatctc

SEQ ID NO: 39989 - DNA, 20 bp, Artificial Sequence
  chemically synthesized
gaaagaaaatgatgatctca

SEQ ID NO: 39990 - DNA, 20 bp, Artificial Sequence
  chemically synthesized
aaagaaaatgatgatctcag

SEQ ID NO: 39991 - DNA, 20 bp, Artificial Sequence
  chemically synthesized
ggggatctgtctcccacctt

SEQ ID NO: 39992 - DNA, 20 bp, Artificial Sequence
  chemically synthesized
gatctgtctcccaccttcag

SEQ ID NO: 39993 - DNA, 20 bp, Artificial Sequence
  chemically synthesized
ctgtctcccaccttcagaag

SEQ ID NO: 39994 - DNA, 20 bp, Artificial Sequence
  chemically synthesized
caccttcagaagcagatact

SEQ ID NO: 39995 - DNA, 20 bp, Artificial Sequence
  chemically synthesized
tactgagccacaaatctgct

SEQ ID NO: 39996 - DNA, 20 bp, Artificial Sequence
  chemically synthesized
ctgctaagattgccctgaat

SEQ ID NO: 39997 - DNA, 20 bp, Artificial Sequence
  chemically synthesized
gctaagattgccctgaatga

SEQ ID NO: 39998 - DNA, 20 bp, Artificial Sequence
  chemically synthesized
aatgagagttttaactcctg

SEQ ID NO: 39999 - DNA, 20 bp, Artificial Sequence
  chemically synthesized
tgagagttttaactcctgta

SEQ ID NO: 40000 - DNA, 20 bp, Artificial Sequence
  chemically synthesized
agttttaactcctgtagaga

SEQ ID NO: 40001 - DNA, 20 bp, Artificial Sequence
  chemically synthesized
ttttaactcctgtagagaaa

SEQ ID NO: 40002 - DNA, 20 bp, Artificial Sequence
  chemically synthesized
gagttgaaattgtgaaaaaa

SEQ ID NO: 40003 - DNA, 20 bp, Artificial Sequence
  chemically synthesized
gttgaaattgtgaaaaaaca

SEQ ID NO: 40004 - DNA, 20 bp, Artificial Sequence
  chemically synthesized
aattgtgaaaaaacagagac

SEQ ID NO: 40005 - DNA, 20 bp, Artificial Sequence
  chemically synthesized
gagacaagctgttatcatgc

SEQ ID NO: 40006 - DNA, 20 bp, Artificial Sequence
  chemically synthesized
acaagctgttatcatgcgag

SEQ ID NO: 40007 - DNA, 20 bp, Artificial Sequence
  chemically synthesized
gcgagtagctgatctgcaac

SEQ ID NO: 40008 - DNA, 20 bp, Artificial Sequence
  chemically synthesized
gagtagctgatctgcaacaa

SEQ ID NO: 40009 - DNA, 20 bp, Artificial Sequence
  chemically synthesized
agtagctgatctgcaacaag

SEQ ID NO: 40010 - DNA, 20 bp, Artificial Sequence
  chemically synthesized
tgcaacaagaggtgcatgca

SEQ ID NO: 40011 - DNA, 20 bp, Artificial Sequence
  chemically synthesized
aggtgcatgcacagccttgc

SEQ ID NO: 40012 - DNA, 20 bp, Artificial Sequence
  chemically synthesized
ggtgcatgcacagccttgcc

SEQ ID NO: 40013 - DNA, 20 bp, Artificial Sequence
  chemically synthesized
ttgccaggtgtttactgtta

SEQ ID NO: 40014 - DNA, 20 bp, Artificial Sequence
  chemically synthesized
caggtgtttactgttaaagt

SEQ ID NO: 40015 - DNA, 20 bp, Artificial Sequence
  chemically synthesized
aggtgtttactgttaaagtg

SEQ ID NO: 40016 - DNA, 20 bp, Artificial Sequence
  chemically synthesized
ggtgtttactgttaaagtga

SEQ ID NO: 40017 - DNA, 20 bp, Artificial Sequence
  chemically synthesized
gttaaagtgagggcattgac

SEQ ID NO: 40018 - DNA, 20 bp, Artificial Sequence
  chemically synthesized
gggcattgactggaaaaaaa

SEQ ID NO: 40019 - DNA, 20 bp, Artificial Sequence
  chemically synthesized
ggcattgactggaaaaaaat

SEQ ID NO: 40020 - DNA, 20 bp, Artificial Sequence
  chemically synthesized
actggaaaaaaatgggaccc

SEQ ID NO: 40021 - DNA, 20 bp, Artificial Sequence
  chemically synthesized
aaaaatgggaccctggaact

SEQ ID NO: 40022 - DNA, 20 bp, Artificial Sequence
  chemically synthesized
aaatgggaccctggaacttg

SEQ ID NO: 40023 - DNA, 20 bp, Artificial Sequence
  chemically synthesized
tgggaccctggaacttggag

SEQ ID NO: 40024 - DNA, 20 bp, Artificial Sequence
  chemically synthesized
gggaccctggaacttggagt

SEQ ID NO: 40025 - DNA, 20 bp, Artificial Sequence
  chemically synthesized
ggaccctggaacttggagtg

SEQ ID NO: 40026 - DNA, 20 bp, Artificial Sequence
  chemically synthesized
gaacttggagtggggatgtg

SEQ ID NO: 40027 - DNA, 20 bp, Artificial Sequence
  chemically synthesized
aacttggagtggggatgtgt

SEQ ID NO: 40028 - DNA, 20 bp, Artificial Sequence
  chemically synthesized
cttggagtggggatgtgtgg

SEQ ID NO: 40029 - DNA, 20 bp, Artificial Sequence
  chemically synthesized
tgtgtgggagaaccctgatg

SEQ ID NO: 40030 - DNA, 20 bp, Artificial Sequence
  chemically synthesized
gggagaaccctgatgaagct

SEQ ID NO: 40031 - DNA, 20 bp, Artificial Sequence
  chemically synthesized
ggagaaccctgatgaagctg

SEQ ID NO: 40032 - DNA, 20 bp, Artificial Sequence
  chemically synthesized
ctgatgaagctgaggacact

SEQ ID NO: 40033 - DNA, 20 bp, Artificial Sequence
  chemically synthesized
ctctgatgaaacttttttgc

SEQ ID NO: 40034 - DNA, 20 bp, Artificial Sequence
  chemically synthesized
tgatgaaacttttttgccag

SEQ ID NO: 40035 - DNA, 20 bp, Artificial Sequence
  chemically synthesized
aacttttttgccagaagaaa

SEQ ID NO: 40036 - DNA, 20 bp, Artificial Sequence
  chemically synthesized
agaaacagtttccccatccc

SEQ ID NO: 40037 - DNA, 20 bp, Artificial Sequence
  chemically synthesized
aacagtttccccatccccag

SEQ ID NO: 40038 - DNA, 20 bp, Artificial Sequence
  chemically synthesized
agtttccccatccccagtag

SEQ ID NO: 40039 - DNA, 20 bp, Artificial Sequence
  chemically synthesized
tccctgacccgtgctgccat

SEQ ID NO: 40040 - DNA, 20 bp, Artificial Sequence
  chemically synthesized
tagcctttccacctttgtct

SEQ ID NO: 40041 - DNA, 20 bp, Artificial Sequence
  chemically synthesized
agcctttccacctttgtctg

SEQ ID NO: 40042 - DNA, 20 bp, Artificial Sequence
  chemically synthesized
atgtaaaccctgcactgctt

SEQ ID NO: 40043 - DNA, 20 bp, Artificial Sequence
  chemically synthesized
tgtaaaccctgcactgcttg

SEQ ID NO: 40044 - DNA, 20 bp, Artificial Sequence
  chemically synthesized
ccctgcactgcttgaggcaa

SEQ ID NO: 40045 - DNA, 20 bp, Artificial Sequence
  chemically synthesized
actgcttgaggcaacagtga

SEQ ID NO: 40046 - DNA, 20 bp, Artificial Sequence
  chemically synthesized
caacagtgatggccttccct

SEQ ID NO: 40047 - DNA, 20 bp, Artificial Sequence
  chemically synthesized
aacagtgatggccttccctg

SEQ ID NO: 40048 - DNA, 20 bp, Artificial Sequence
  chemically synthesized
agtgatggccttccctgagg

SEQ ID NO: 40049 - DNA, 20 bp, Artificial Sequence
  chemically synthesized
gccttccctgaggcagctgc

SEQ ID NO: 40050 - DNA, 20 bp, Artificial Sequence
  chemically synthesized
ccttccctgaggcagctgcc

SEQ ID NO: 40051 - DNA, 20 bp, Artificial Sequence
  chemically synthesized
ccctgaggcagctgccaggc

SEQ ID NO: 40052 - DNA, 20 bp, Artificial Sequence
  chemically synthesized
agataatgttgattctcctc

SEQ ID NO: 40053 - DNA, 20 bp, Artificial Sequence
  chemically synthesized
ataatgttgattctcctcaa

SEQ ID NO: 40054 - DNA, 20 bp, Artificial Sequence
  chemically synthesized
taatgttgattctcctcaag

SEQ ID NO: 40055 - DNA, 20 bp, Artificial Sequence
  chemically synthesized
ctaatgcccctgaatgcttc

SEQ ID NO: 40056 - DNA, 20 bp, Artificial Sequence
  chemically synthesized
aatgcttctagacctataac

SEQ ID NO: 40057 - DNA, 20 bp, Artificial Sequence
  chemically synthesized
atgcttctagacctataact

SEQ ID NO: 40058 - DNA, 20 bp, Artificial Sequence
  chemically synthesized
taactaggctaaattccttg

SEQ ID NO: 40059 - DNA, 20 bp, Artificial Sequence
  chemically synthesized
aactaggctaaattccttgc

SEQ ID NO: 40060 - DNA, 20 bp, Artificial Sequence
  chemically synthesized
gctaaattccttgcgggccc

SEQ ID NO: 40061 - DNA, 20 bp, Artificial Sequence
  chemically synthesized
taaattccttgcgggcccca

SEQ ID NO: 40062 - DNA, 20 bp, Artificial Sequence
  chemically synthesized
aaattccttgcgggccccag

SEQ ID NO: 40063 - DNA, 20 bp, Artificial Sequence
  chemically synthesized
tccttgcgggccccagaggt

SEQ ID NO: 40064 - DNA, 20 bp, Artificial Sequence
  chemically synthesized
ccttgcgggccccagaggtg

SEQ ID NO: 40065 - DNA, 20 bp, Artificial Sequence
  chemically synthesized
cgggccccagaggtgaggtt

SEQ ID NO: 40066 - DNA, 20 bp, Artificial Sequence
  chemically synthesized
ggccccagaggtgaggttca

SEQ ID NO: 40067 - DNA, 20 bp, Artificial Sequence
  chemically synthesized
aggttcagagtgtgacccat

SEQ ID NO: 40068 - DNA, 20 bp, Artificial Sequence
  chemically synthesized
ggttcagagtgtgacccatg

SEQ ID NO: 40069 - DNA, 20 bp, Artificial Sequence
  chemically synthesized
ttcagagtgtgacccatgag

SEQ ID NO: 40070 - DNA, 20 bp, Artificial Sequence
  chemically synthesized
tcagagtgtgacccatgagg

SEQ ID NO: 40071 - DNA, 20 bp, Artificial Sequence
  chemically synthesized
ggaggtgcattatactctaa

SEQ ID NO: 40072 - DNA, 20 bp, Artificial Sequence
  chemically synthesized
atactctaaaagaactgctt

SEQ ID NO: 40073 - DNA, 20 bp, Artificial Sequence
  chemically synthesized
ttaagctttctaatttatat

SEQ ID NO: 40074 - DNA, 20 bp, Artificial Sequence
  chemically synthesized
agctttctaatttatattgg

SEQ ID NO: 40075 - DNA, 20 bp, Artificial Sequence
  chemically synthesized
aatttatattggcagaaatc

SEQ ID NO: 40076 - DNA, 20 bp, Artificial Sequence
  chemically synthesized
tttatattggcagaaatctg

SEQ ID NO: 40077 - DNA, 20 bp, Artificial Sequence
  chemically synthesized
attggcagaaatctggagaa

SEQ ID NO: 40078 - DNA, 20 bp, Artificial Sequence
  chemically synthesized
ttggcagaaatctggagaac

SEQ ID NO: 40079 - DNA, 20 bp, Artificial Sequence
  chemically synthesized
agaaatctggagaacaggca

SEQ ID NO: 40080 - DNA, 20 bp, Artificial Sequence
  chemically synthesized
gaaatctggagaacaggcat

SEQ ID NO: 40081 - DNA, 20 bp, Artificial Sequence
  chemically synthesized
ctggagaacaggcatgggaa

SEQ ID NO: 40082 - DNA, 20 bp, Artificial Sequence
  chemically synthesized
caggcatgggaatggatatt

SEQ ID NO: 40083 - DNA, 20 bp, Artificial Sequence
  chemically synthesized
aggcatgggaatggatatta

SEQ ID NO: 40084 - DNA, 20 bp, Artificial Sequence
  chemically synthesized
ggcatgggaatggatattaa

SEQ ID NO: 40085 - DNA, 20 bp, Artificial Sequence
  chemically synthesized
tgggaatggatattaagggt

SEQ ID NO: 40086 - DNA, 20 bp, Artificial Sequence
  chemically synthesized
gggaatggatattaagggta

SEQ ID NO: 40087 - DNA, 20 bp, Artificial Sequence
  chemically synthesized
ggaatggatattaagggtaa

SEQ ID NO: 40088 - DNA, 20 bp, Artificial Sequence
  chemically synthesized
atattaagggtaagggataa

SEQ ID NO: 40089 - DNA, 20 bp, Artificial Sequence
  chemically synthesized
ttaagggtaagggataatgg

SEQ ID NO: 40090 - DNA, 20 bp, Artificial Sequence
  chemically synthesized
agggtaagggataatggtgg

SEQ ID NO: 40091 - DNA, 20 bp, Artificial Sequence
  chemically synthesized
gggtaagggataatggtgga

SEQ ID NO: 40092 - DNA, 20 bp, Artificial Sequence
  chemically synthesized
ggtaagggataatggtggaa

SEQ ID NO: 40093 - DNA, 20 bp, Artificial Sequence
  chemically synthesized
ggataatggtggaagggaca

SEQ ID NO: 40094 - DNA, 20 bp, Artificial Sequence
  chemically synthesized
ataatggtggaagggacata

SEQ ID NO: 40095 - DNA, 20 bp, Artificial Sequence
  chemically synthesized
tggtggaagggacatagagt

SEQ ID NO: 40096 - DNA, 20 bp, Artificial Sequence
  chemically synthesized
aagggacatagagttggatc

SEQ ID NO: 40097 - DNA, 20 bp, Artificial Sequence
  chemically synthesized
ttggatcaagctgaatttat

SEQ ID NO: 40098 - DNA, 20 bp, Artificial Sequence
  chemically synthesized
tcaagctgaatttattggtt

SEQ ID NO: 40099 - DNA, 20 bp, Artificial Sequence
  chemically synthesized
tttattggtttggccctact

SEQ ID NO: 40100 - DNA, 20 bp, Artificial Sequence
  chemically synthesized
attggtttggccctactaag

SEQ ID NO: 40101 - DNA, 20 bp, Artificial Sequence
  chemically synthesized
ttggtttggccctactaagt

SEQ ID NO: 40102 - DNA, 20 bp, Artificial Sequence
  chemically synthesized
tggtttggccctactaagta

SEQ ID NO: 40103 - DNA, 20 bp, Artificial Sequence
  chemically synthesized
ggattctgcatttaatgttg

SEQ ID NO: 40104 - DNA, 20 bp, Artificial Sequence
  chemically synthesized
ctgcatttaatgttgcagct

SEQ ID NO: 40105 - DNA, 20 bp, Artificial Sequence
  chemically synthesized
tgcatttaatgttgcagctc

SEQ ID NO: 40106 - DNA, 20 bp, Artificial Sequence
  chemically synthesized
gcatttaatgttgcagctcg

SEQ ID NO: 40107 - DNA, 20 bp, Artificial Sequence
  chemically synthesized
aatgttgcagctcggggact

SEQ ID NO: 40108 - DNA, 20 bp, Artificial Sequence
  chemically synthesized
tgcagctcggggacttagaa

SEQ ID NO: 40109 - DNA, 20 bp, Artificial Sequence
  chemically synthesized
gcagctcggggacttagaaa

SEQ ID NO: 40110 - DNA, 20 bp, Artificial Sequence
  chemically synthesized
ggacttagaaaaggttctga

SEQ ID NO: 40111 - DNA, 20 bp, Artificial Sequence
  chemically synthesized
gacttagaaaaggttctgat

SEQ ID NO: 40112 - DNA, 20 bp, Artificial Sequence
  chemically synthesized
acttagaaaaggttctgata

SEQ ID NO: 40113 - DNA, 20 bp, Artificial Sequence
  chemically synthesized
agaaaaggttctgatagggc

SEQ ID NO: 40114 - DNA, 20 bp, Artificial Sequence
  chemically synthesized
gaaaaggttctgatagggcc

SEQ ID NO: 40115 - DNA, 20 bp, Artificial Sequence
  chemically synthesized
aaaggttctgatagggccgg

SEQ ID NO: 40116 - DNA, 20 bp, Artificial Sequence
  chemically synthesized
ggttctgatagggccgggag

SEQ ID NO: 40117 - DNA, 20 bp, Artificial Sequence
  chemically synthesized
tctgatagggccgggagcag

SEQ ID NO: 40118 - DNA, 20 bp, Artificial Sequence
  chemically synthesized
gtggctcacgcctgtaatcc

SEQ ID NO: 40119 - DNA, 20 bp, Artificial Sequence
  chemically synthesized
cgcctgtaatcccagcacct

SEQ ID NO: 40120 - DNA, 20 bp, Artificial Sequence
  chemically synthesized
gcctgtaatcccagcacctt

SEQ ID NO: 40121 - DNA, 20 bp, Artificial Sequence
  chemically synthesized
ctgtaatcccagcaccttgg

SEQ ID NO: 40122 - DNA, 20 bp, Artificial Sequence
  chemically synthesized
tgtaatcccagcaccttggg

SEQ ID NO: 40123 - DNA, 20 bp, Artificial Sequence
  chemically synthesized
aatcccagcaccttgggagg

SEQ ID NO: 40124 - DNA, 20 bp, Artificial Sequence
  chemically synthesized
atcccagcaccttgggaggc

SEQ ID NO: 40125 - DNA, 20 bp, Artificial Sequence
  chemically synthesized
tcccagcaccttgggaggcg

SEQ ID NO: 40126 - DNA, 20 bp, Artificial Sequence
  chemically synthesized
cccagcaccttgggaggcgg

SEQ ID NO: 40127 - DNA, 20 bp, Artificial Sequence
  chemically synthesized
agcaccttgggaggcggggg

SEQ ID NO: 40128 - DNA, 20 bp, Artificial Sequence
  chemically synthesized
gcaccttgggaggcgggggc

SEQ ID NO: 40129 - DNA, 20 bp, Artificial Sequence
  chemically synthesized
ccttgggaggcgggggcggg

SEQ ID NO: 40130 - DNA, 20 bp, Artificial Sequence
  chemically synthesized
ggcgggggcgggcagatcac

SEQ ID NO: 40131 - DNA, 20 bp, Artificial Sequence
  chemically synthesized
gggcgggcagatcacgagat

SEQ ID NO: 40132 - DNA, 20 bp, Artificial Sequence
  chemically synthesized
ggcgggcagatcacgagatc

SEQ ID NO: 40133 - DNA, 20 bp, Artificial Sequence
  chemically synthesized
cgggcagatcacgagatcag

SEQ ID NO: 40134 - DNA, 20 bp, Artificial Sequence
  chemically synthesized
gatcacgagatcaggagatt

SEQ ID NO: 40135 - DNA, 20 bp, Artificial Sequence
  chemically synthesized
tcaggagattgagacaattc

SEQ ID NO: 40136 - DNA, 20 bp, Artificial Sequence
  chemically synthesized
tgagacaattctggctaaaa

SEQ ID NO: 40137 - DNA, 20 bp, Artificial Sequence
  chemically synthesized
tctgctaaaaatacaaaaat

SEQ ID NO: 40138 - DNA, 20 bp, Artificial Sequence
  chemically synthesized
ctaaaaatacaaaaattagc

SEQ ID NO: 40139 - DNA, 20 bp, Artificial Sequence
  chemically synthesized
taaaaatacaaaaattagct

SEQ ID NO: 40140 - DNA, 20 bp, Artificial Sequence
  chemically synthesized
atacaaaaattagctgggca

SEQ ID NO: 40141 - DNA, 20 bp, Artificial Sequence
  chemically synthesized
taactgtaatctcatctact

SEQ ID NO: 40142 - DNA, 20 bp, Artificial Sequence
  chemically synthesized
aactgtaatctcatctactt

SEQ ID NO: 40143 - DNA, 20 bp, Artificial Sequence
  chemically synthesized
ctgtaatctcatctacttgg

SEQ ID NO: 40144 - DNA, 20 bp, Artificial Sequence
  chemically synthesized
tgtaatctcatctacttggg

SEQ ID NO: 40145 - DNA, 20 bp, Artificial Sequence
  chemically synthesized
tctcatctacttgggaggct

SEQ ID NO: 40146 - DNA, 20 bp, Artificial Sequence
  chemically synthesized
ctcatctacttgggaggctg

SEQ ID NO: 40147 - DNA, 20 bp, Artificial Sequence
  chemically synthesized
tctacttgggaggctgaggc

SEQ ID NO: 40148 - DNA, 20 bp, Artificial Sequence
  chemically synthesized
tacttgggaggctgaggcaa

SEQ ID NO: 40149 - DNA, 20 bp, Artificial Sequence
  chemically synthesized
agagaactgcttgaacctgt

SEQ ID NO: 40150 - DNA, 20 bp, Artificial Sequence
  chemically synthesized
gagaactgcttgaacctgtg

SEQ ID NO: 40151 - DNA, 20 bp, Artificial Sequence
  chemically synthesized
aactgcttgaacctgtgagg

SEQ ID NO: 40152 - DNA, 20 bp, Artificial Sequence
  chemically synthesized
ctgcttgaacctgtgaggca

SEQ ID NO: 40153 - DNA, 20 bp, Artificial Sequence
  chemically synthesized
aacctgtgaggcagagattg

SEQ ID NO: 40154 - DNA, 20 bp, Artificial Sequence
  chemically synthesized
tgtgaggcagagattgcagt

SEQ ID NO: 40155 - DNA, 20 bp, Artificial Sequence
  chemically synthesized
ggcagagattgcagtgagcc

SEQ ID NO: 40156 - DNA, 20 bp, Artificial Sequence
  chemically synthesized
aagatcgccccactgcattc

SEQ ID NO: 40157 - DNA, 20 bp, Artificial Sequence
  chemically synthesized
cgccccactgcattccagcc

SEQ ID NO: 40158 - DNA, 20 bp, Artificial Sequence
  chemically synthesized
actgcattccagcctggtaa

SEQ ID NO: 40159 - DNA, 20 bp, Artificial Sequence
  chemically synthesized
tgcattccagcctggtaaca

SEQ ID NO: 40160 - DNA, 20 bp, Artificial Sequence
  chemically synthesized
ttccagcctggtaacagagc

SEQ ID NO: 40161 - DNA, 20 bp, Artificial Sequence
  chemically synthesized
ttccaaaaaaaaaaaaaaaa

SEQ ID NO: 40162 - DNA, 20 bp, Artificial Sequence
  chemically synthesized
aaaaaaaaaaaaagttataa

SEQ ID NO: 40163 - DNA, 20 bp, Artificial Sequence
  chemically synthesized
gttataatagtttatttgct

SEQ ID NO: 40164 - DNA, 20 bp, Artificial Sequence
  chemically synthesized
taatagtttatttgcttggt

SEQ ID NO: 40165 - DNA, 20 bp, Artificial Sequence
  chemically synthesized
ttgcttggttagctgaaata

SEQ ID NO: 40166 - DNA, 20 bp, Artificial Sequence
  chemically synthesized
ttagctgaaatatggattaa

SEQ ID NO: 40167 - DNA, 20 bp, Artificial Sequence
  chemically synthesized
ctgaaatatggattaaaaga

SEQ ID NO: 40168 - DNA, 20 bp, Artificial Sequence
  chemically synthesized
attaaaagatggtccaatgt

SEQ ID NO: 40169 - DNA, 20 bp, Artificial Sequence
  chemically synthesized
aaagatggtccaatgttagt

SEQ ID NO: 40170 - DNA, 20 bp, Artificial Sequence
  chemically synthesized
atggtccaatgttagtgagc

SEQ ID NO: 40171 - DNA, 20 bp, Artificial Sequence
  chemically synthesized
ttagtgagctggaaatgcct

SEQ ID NO: 40172 - DNA, 20 bp, Artificial Sequence
  chemically synthesized
ggaaatgccttggtttaatg

SEQ ID NO: 40173 - DNA, 20 bp, Artificial Sequence
  chemically synthesized
aaatgccttggtttaatgta

SEQ ID NO: 40174 - DNA, 20 bp, Artificial Sequence
  chemically synthesized
aatgccttggtttaatgtag

SEQ ID NO: 40175 - DNA, 20 bp, Artificial Sequence
  chemically synthesized
gccttggtttaatgtagagg

SEQ ID NO: 40176 - DNA, 20 bp, Artificial Sequence
  chemically synthesized
aatgtagaggaagtgatcca

SEQ ID NO: 40177 - DNA, 20 bp, Artificial Sequence
  chemically synthesized
atgtagaggaagtgatccaa

SEQ ID NO: 40178 - DNA, 20 bp, Artificial Sequence
  chemically synthesized
gaggaagtgatccaaaggct

SEQ ID NO: 40179 - DNA, 20 bp, Artificial Sequence
  chemically synthesized
aggaagtgatccaaaggctt

SEQ ID NO: 40180 - DNA, 20 bp, Artificial Sequence
  chemically synthesized
ggaagtgatccaaaggctta

SEQ ID NO: 40181 - DNA, 20 bp, Artificial Sequence
  chemically synthesized
aagtgatccaaaggcttagg

SEQ ID NO: 40182 - DNA, 20 bp, Artificial Sequence
  chemically synthesized
atccaaaggcttagggagat

SEQ ID NO: 40183 - DNA, 20 bp, Artificial Sequence
  chemically synthesized
tccaaaggcttagggagatt

SEQ ID NO: 40184 - DNA, 20 bp, Artificial Sequence
  chemically synthesized
aaggcttagggagattagga

SEQ ID NO: 40185 - DNA, 20 bp, Artificial Sequence
  chemically synthesized
gcttagggagattaggatgg

SEQ ID NO: 40186 - DNA, 20 bp, Artificial Sequence
  chemically synthesized
ttagggagattaggatggtg

SEQ ID NO: 40187 - DNA, 20 bp, Artificial Sequence
  chemically synthesized
gggagattaggatggtggag

SEQ ID NO: 40188 - DNA, 20 bp, Artificial Sequence
  chemically synthesized
attaggatggtggagtggat

SEQ ID NO: 40189 - DNA, 20 bp, Artificial Sequence
  chemically synthesized
gtggagtggattagtcactt

SEQ ID NO: 40190 - DNA, 20 bp, Artificial Sequence
  chemically synthesized
cactttagacctactcatcc

SEQ ID NO: 40191 - DNA, 20 bp, Artificial Sequence
  chemically synthesized
ttagacctactcatcccagc

SEQ ID NO: 40192 - DNA, 20 bp, Artificial Sequence
  chemically synthesized
tagacctactcatcccagct

SEQ ID NO: 40193 - DNA, 20 bp, Artificial Sequence
  chemically synthesized
gacctactcatcccagctgg

SEQ ID NO: 40194 - DNA, 20 bp, Artificial Sequence
  chemically synthesized
acctactcatcccagctggg

SEQ ID NO: 40195 - DNA, 20 bp, Artificial Sequence
  chemically synthesized
cctactcatcccagctggga

SEQ ID NO: 40196 - DNA, 20 bp, Artificial Sequence
  chemically synthesized
tcatcccagctgggagggtc

SEQ ID NO: 40197 - DNA, 20 bp, Artificial Sequence
  chemically synthesized
tcccagctgggagggtccag

SEQ ID NO: 40198 - DNA, 20 bp, Artificial Sequence
  chemically synthesized
gggtccagaagatacaccct

SEQ ID NO: 40199 - DNA, 20 bp, Artificial Sequence
  chemically synthesized
agaagatacacccttggccg

SEQ ID NO: 40200 - DNA, 20 bp, Artificial Sequence
  chemically synthesized
ttggccgaagctttgtgaaa

SEQ ID NO: 40201 - DNA, 20 bp, Artificial Sequence
  chemically synthesized
gctttgtgaaatagatttgt

SEQ ID NO: 40202 - DNA, 20 bp, Artificial Sequence
  chemically synthesized
tttgtgaaatagatttgtga

SEQ ID NO: 40203 - DNA, 20 bp, Artificial Sequence
  chemically synthesized
gtgaaatagatttgtgagag

SEQ ID NO: 40204 - DNA, 20 bp, Artificial Sequence
  chemically synthesized
gagcagcacctgtatttttg

SEQ ID NO: 40205 - DNA, 20 bp, Artificial Sequence
  chemically synthesized
gcagcacctgtatttttgaa

SEQ ID NO: 40206 - DNA, 20 bp, Artificial Sequence
  chemically synthesized
aattgctcttctctgtatgt

SEQ ID NO: 40207 - DNA, 20 bp, Artificial Sequence
  chemically synthesized
tctctgtatgtcagatctaa

SEQ ID NO: 40208 - DNA, 20 bp, Artificial Sequence
  chemically synthesized
ctgtatgtcagatctaacag

SEQ ID NO: 40209 - DNA, 20 bp, Artificial Sequence
  chemically synthesized
tgtatgtcagatctaacagt

SEQ ID NO: 40210 - DNA, 20 bp, Artificial Sequence
  chemically synthesized
agatctaacagtaggaacca

SEQ ID NO: 40211 - DNA, 20 bp, Artificial Sequence
  chemically synthesized
actacaaaatttaaatacaa

SEQ ID NO: 40212 - DNA, 20 bp, Artificial Sequence
  chemically synthesized
ctacaaaatttaaatacaat

SEQ ID NO: 40213 - DNA, 20 bp, Artificial Sequence
  chemically synthesized
ttaaatacaatgggaataat

SEQ ID NO: 40214 - DNA, 20 bp, Artificial Sequence
  chemically synthesized
aatgggaataattggatcct

SEQ ID NO: 40215 - DNA, 20 bp, Artificial Sequence
  chemically synthesized
atgggaataattggatcctg

SEQ ID NO: 40216 - DNA, 20 bp, Artificial Sequence
  chemically synthesized
ggaataattggatcctgagg

SEQ ID NO: 40217 - DNA, 20 bp, Artificial Sequence
  chemically synthesized
ataattggatcctgaggtgg

SEQ ID NO: 40218 - DNA, 20 bp, Artificial Sequence
  chemically synthesized
taattggatcctgaggtggc

SEQ ID NO: 40219 - DNA, 20 bp, Artificial Sequence
  chemically synthesized
aattggatcctgaggtggca

SEQ ID NO: 40220 - DNA, 20 bp, Artificial Sequence
  chemically synthesized
attggatcctgaggtggcag

SEQ ID NO: 40221 - DNA, 20 bp, Artificial Sequence
  chemically synthesized
atcctgaggtggcaggggcc

SEQ ID NO: 40222 - DNA, 20 bp, Artificial Sequence
  chemically synthesized
aggtggcaggggccaagtgt

SEQ ID NO: 40223 - DNA, 20 bp, Artificial Sequence
  chemically synthesized
gtgttggcactgaaccatca

SEQ ID NO: 40224 - DNA, 20 bp, Artificial Sequence
  chemically synthesized
tgttggcactgaaccatcaa

SEQ ID NO: 40225 - DNA, 20 bp, Artificial Sequence
  chemically synthesized
ggcactgaaccatcaaaggc

SEQ ID NO: 40226 - DNA, 20 bp, Artificial Sequence
  chemically synthesized
gcactgaaccatcaaaggca

SEQ ID NO: 40227 - DNA, 20 bp, Artificial Sequence
  chemically synthesized
ctgaaccatcaaaggcaagg

SEQ ID NO: 40228 - DNA, 20 bp, Artificial Sequence
  chemically synthesized
tgaaccatcaaaggcaaggt

SEQ ID NO: 40229 - DNA, 20 bp, Artificial Sequence
  chemically synthesized
ggtgggcataactaccataa

SEQ ID NO: 40230 - DNA, 20 bp, Artificial Sequence
  chemically synthesized
ggcataactaccataataga

SEQ ID NO: 40231 - DNA, 20 bp, Artificial Sequence
  chemically synthesized
ataactaccataatagacag

SEQ ID NO: 40232 - DNA, 20 bp, Artificial Sequence
  chemically synthesized
aactaccataatagacagca

SEQ ID NO: 40233 - DNA, 20 bp, Artificial Sequence
  chemically synthesized
actaccataatagacagcag

SEQ ID NO: 40234 - DNA, 20 bp, Artificial Sequence
  chemically synthesized
cataatagacagcagaggca

SEQ ID NO: 40235 - DNA, 20 bp, Artificial Sequence
  chemically synthesized
aatagacagcagaggcaaag

SEQ ID NO: 40236 - DNA, 20 bp, Artificial Sequence
  chemically synthesized
agcagaggcaaagcagccat

SEQ ID NO: 40237 - DNA, 20 bp, Artificial Sequence
  chemically synthesized
aggcaaagcagccatcagaa

SEQ ID NO: 40238 - DNA, 20 bp, Artificial Sequence
  chemically synthesized
tcagaatagtctgactcatg

SEQ ID NO: 40239 - DNA, 20 bp, Artificial Sequence
  chemically synthesized
agaatagtctgactcatgta

SEQ ID NO: 40240 - DNA, 20 bp, Artificial Sequence
  chemically synthesized
gtctgactcatgtagagctc

SEQ ID NO: 40241 - DNA, 20 bp, Artificial Sequence
  chemically synthesized
ctcatgtagagctctggcat

SEQ ID NO: 40242 - DNA, 20 bp, Artificial Sequence
  chemically synthesized
tggcattggctaattaatca

SEQ ID NO: 40243 - DNA, 20 bp, Artificial Sequence
  chemically synthesized
ctaattaatcatggtgttcc

SEQ ID NO: 40244 - DNA, 20 bp, Artificial Sequence
  chemically synthesized
attaatcatggtgttcctag

SEQ ID NO: 40245 - DNA, 20 bp, Artificial Sequence
  chemically synthesized
gttcctagaagtgaaattga

SEQ ID NO: 40246 - DNA, 20 bp, Artificial Sequence
  chemically synthesized
ttcctagaagtgaaattgat

SEQ ID NO: 40247 - DNA, 20 bp, Artificial Sequence
  chemically synthesized
ttatataaacaaaaaactgc

SEQ ID NO: 40248 - DNA, 20 bp, Artificial Sequence
  chemically synthesized
tatataaacaaaaaactgcc

SEQ ID NO: 40249 - DNA, 20 bp, Artificial Sequence
  chemically synthesized
ataaacaaaaaactgccagg

SEQ ID NO: 40250 - DNA, 20 bp, Artificial Sequence
  chemically synthesized
caaaaaactgccaggtagaa

SEQ ID NO: 40251 - DNA, 20 bp, Artificial Sequence
  chemically synthesized
ctgccaggtagaatggacta

SEQ ID NO: 40252 - DNA, 20 bp, Artificial Sequence
  chemically synthesized
actaatctgaattataaaaa

SEQ ID NO: 40253 - DNA, 20 bp, Artificial Sequence
  chemically synthesized
taatctgaattataaaaaca

SEQ ID NO: 40254 - DNA, 20 bp, Artificial Sequence
  chemically synthesized
attataaaaacagagaatca

SEQ ID NO: 40255 - DNA, 20 bp, Artificial Sequence
  chemically synthesized
ttataaaaacagagaatcat

SEQ ID NO: 40256 - DNA, 20 bp, Artificial Sequence
  chemically synthesized
atgggccctcaatcaatttc

SEQ ID NO: 40257 - DNA, 20 bp, Artificial Sequence
  chemically synthesized
ttccagactcgaacctgtta

SEQ ID NO: 40258 - DNA, 20 bp, Artificial Sequence
  chemically synthesized
actcgaacctgttacagttc

SEQ ID NO: 40259 - DNA, 20 bp, Artificial Sequence
  chemically synthesized
gttccagaacccactgaatg

SEQ ID NO: 40260 - DNA, 20 bp, Artificial Sequence
  chemically synthesized
ttccagaacccactgaatga

SEQ ID NO: 40261 - DNA, 20 bp, Artificial Sequence
  chemically synthesized
tccagaacccactgaatgaa

SEQ ID NO: 40262 - DNA, 20 bp, Artificial Sequence
  chemically synthesized
ccagaacccactgaatgaag

SEQ ID NO: 40263 - DNA, 20 bp, Artificial Sequence
  chemically synthesized
agaacccactgaatgaaggg

SEQ ID NO: 40264 - DNA, 20 bp, Artificial Sequence
  chemically synthesized
gaacccactgaatgaagggg

SEQ ID NO: 40265 - DNA, 20 bp, Artificial Sequence
  chemically synthesized
ccactgaatgaaggggaggc

SEQ ID NO: 40266 - DNA, 20 bp, Artificial Sequence
  chemically synthesized
aggggaggctggatcccctt

SEQ ID NO: 40267 - DNA, 20 bp, Artificial Sequence
  chemically synthesized
ggggaggctggatccccttg

SEQ ID NO: 40268 - DNA, 20 bp, Artificial Sequence
  chemically synthesized
gaggctggatccccttgagg

SEQ ID NO: 40269 - DNA, 20 bp, Artificial Sequence
  chemically synthesized
aggctggatccccttgagga

SEQ ID NO: 40270 - DNA, 20 bp, Artificial Sequence
  chemically synthesized
cccttgaggaaggacaccac

SEQ ID NO: 40271 - DNA, 20 bp, Artificial Sequence
  chemically synthesized
ccttgaggaaggacaccact

SEQ ID NO: 40272 - DNA, 20 bp, Artificial Sequence
  chemically synthesized
tctttctcccatccttccct

SEQ ID NO: 40273 - DNA, 20 bp, Artificial Sequence
  chemically synthesized
ctttctcccatccttcccta

SEQ ID NO: 40274 - DNA, 20 bp, Artificial Sequence
  chemically synthesized
ttctcccatccttccctaag

SEQ ID NO: 40275 - DNA, 20 bp, Artificial Sequence
  chemically synthesized
tccttccctaaggagacctc

SEQ ID NO: 40276 - DNA, 20 bp, Artificial Sequence
  chemically synthesized
ggagacctctggccttttac

SEQ ID NO: 40277 - DNA, 20 bp, Artificial Sequence
  chemically synthesized
gagacctctggccttttacc

SEQ ID NO: 40278 - DNA, 20 bp, Artificial Sequence
  chemically synthesized
agacctctggccttttacca

SEQ ID NO: 40279 - DNA, 20 bp, Artificial Sequence
  chemically synthesized
accagggtaactgtgtgtac

SEQ ID NO: 40280 - DNA, 20 bp, Artificial Sequence
  chemically synthesized
cagggtaactgtgtgtactg

SEQ ID NO: 40281 - DNA, 20 bp, Artificial Sequence
  chemically synthesized
gtaactgtgtgtactggaga

SEQ ID NO: 40282 - DNA, 20 bp, Artificial Sequence
  chemically synthesized
taactgtgtgtactggagaa

SEQ ID NO: 40283 - DNA, 20 bp, Artificial Sequence
  chemically synthesized
aactgtgtgtactggagaaa

SEQ ID NO: 40284 - DNA, 20 bp, Artificial Sequence
  chemically synthesized
tgtgtgtactggagaaaggg

SEQ ID NO: 40285 - DNA, 20 bp, Artificial Sequence
  chemically synthesized
actggagaaagggaagtaat

SEQ ID NO: 40286 - DNA, 20 bp, Artificial Sequence
  chemically synthesized
agggaagtaatgagacattt

SEQ ID NO: 40287 - DNA, 20 bp, Artificial Sequence
  chemically synthesized
aagtaatgagacatttcaga

SEQ ID NO: 40288 - DNA, 20 bp, Artificial Sequence
  chemically synthesized
tgagacatttcagaaagtac

SEQ ID NO: 40289 - DNA, 20 bp, Artificial Sequence
  chemically synthesized
tttcagaaagtactggacac

SEQ ID NO: 40290 - DNA, 20 bp, Artificial Sequence
  chemically synthesized
aagtactggacactggctct

SEQ ID NO: 40291 - DNA, 20 bp, Artificial Sequence
  chemically synthesized
ctctgagctgacgttgattc

SEQ ID NO: 40292 - DNA, 20 bp, Artificial Sequence
  chemically synthesized
tctgagctgacgttgattcc

SEQ ID NO: 40293 - DNA, 20 bp, Artificial Sequence
  chemically synthesized
ctgagctgacgttgattcca

SEQ ID NO: 40294 - DNA, 20 bp, Artificial Sequence
  chemically synthesized
gggtacccaaaacgttattg

SEQ ID NO: 40295 - DNA, 20 bp, Artificial Sequence
  chemically synthesized
aaaacgttattgtggttccc

SEQ ID NO: 40296 - DNA, 20 bp, Artificial Sequence
  chemically synthesized
ttattgtggttccccagtta

SEQ ID NO: 40297 - DNA, 20 bp, Artificial Sequence
  chemically synthesized
ttgtggttccccagttaaag

SEQ ID NO: 40298 - DNA, 20 bp, Artificial Sequence
  chemically synthesized
tgtggttccccagttaaagt

SEQ ID NO: 40299 - DNA, 20 bp, Artificial Sequence
  chemically synthesized
gtggttccccagttaaagta

SEQ ID NO: 40300 - DNA, 20 bp, Artificial Sequence
  chemically synthesized
tggttccccagttaaagtag

SEQ ID NO: 40301 - DNA, 20 bp, Artificial Sequence
  chemically synthesized
ccagttaaagtaggggctta

SEQ ID NO: 40302 - DNA, 20 bp, Artificial Sequence
  chemically synthesized
agttaaagtaggggcttatg

SEQ ID NO: 40303 - DNA, 20 bp, Artificial Sequence
  chemically synthesized
gttaaagtaggggcttatgg

SEQ ID NO: 40304 - DNA, 20 bp, Artificial Sequence
  chemically synthesized
aagtaggggcttatggaggt

SEQ ID NO: 40305 - DNA, 20 bp, Artificial Sequence
  chemically synthesized
agtaggggcttatggaggtt

SEQ ID NO: 40306 - DNA, 20 bp, Artificial Sequence
  chemically synthesized
tatggaggttaggtaattaa

SEQ ID NO: 40307 - DNA, 20 bp, Artificial Sequence
  chemically synthesized
tggaggttaggtaattaatg

SEQ ID NO: 40308 - DNA, 20 bp, Artificial Sequence
  chemically synthesized
ttaggtaattaatggagttt

SEQ ID NO: 40309 - DNA, 20 bp, Artificial Sequence
  chemically synthesized
tttagctcatttctgactta

SEQ ID NO: 40310 - DNA, 20 bp, Artificial Sequence
  chemically synthesized
agctcatttctgacttacag

SEQ ID NO: 40311 - DNA, 20 bp, Artificial Sequence
  chemically synthesized
tttctgacttacagtggttc

SEQ ID NO: 40312 - DNA, 20 bp, Artificial Sequence
  chemically synthesized
ctgacttacagtggttccag

SEQ ID NO: 40313 - DNA, 20 bp, Artificial Sequence
  chemically synthesized
tgacttacagtggttccagt

SEQ ID NO: 40314 - DNA, 20 bp, Artificial Sequence
  chemically synthesized
cagtggttccagtgggtccc

SEQ ID NO: 40315 - DNA, 20 bp, Artificial Sequence
  chemically synthesized
gggtccctggacttatcctc

SEQ ID NO: 40316 - DNA, 20 bp, Artificial Sequence
  chemically synthesized
ttatcctctggtcattttcc

SEQ ID NO: 40317 - DNA, 20 bp, Artificial Sequence
  chemically synthesized
gccaaaatgcataatttgta

SEQ ID NO: 40318 - DNA, 20 bp, Artificial Sequence
  chemically synthesized
atttgtatagacatacttat

SEQ ID NO: 40319 - DNA, 20 bp, Artificial Sequence
  chemically synthesized
gtatagacatacttattagc

SEQ ID NO: 40320 - DNA, 20 bp, Artificial Sequence
  chemically synthesized
tagacatacttattagctgg

SEQ ID NO: 40321 - DNA, 20 bp, Artificial Sequence
  chemically synthesized
agctggcagaaatgccacat

SEQ ID NO: 40322 - DNA, 20 bp, Artificial Sequence
  chemically synthesized
tgccacattggctccctgac

SEQ ID NO: 40323 - DNA, 20 bp, Artificial Sequence
  chemically synthesized
cacattggctccctgactgg

SEQ ID NO: 40324 - DNA, 20 bp, Artificial Sequence
  chemically synthesized
acattggctccctgactggt

SEQ ID NO: 40325 - DNA, 20 bp, Artificial Sequence
  chemically synthesized
ggctccctgactggtaggat

SEQ ID NO: 40326 - DNA, 20 bp, Artificial Sequence
  chemically synthesized
gctccctgactggtaggatg

SEQ ID NO: 40327 - DNA, 20 bp, Artificial Sequence
  chemically synthesized
ctccctgactggtaggatga

SEQ ID NO: 40328 - DNA, 20 bp, Artificial Sequence
  chemically synthesized
tggtaggatgagggctatta

SEQ ID NO: 40329 - DNA, 20 bp, Artificial Sequence
  chemically synthesized
taggatgagggctattatgg

SEQ ID NO: 40330 - DNA, 20 bp, Artificial Sequence
  chemically synthesized
aggatgagggctattatggt

SEQ ID NO: 40331 - DNA, 20 bp, Artificial Sequence
  chemically synthesized
tgagggctattatggtggga

SEQ ID NO: 40332 - DNA, 20 bp, Artificial Sequence
  chemically synthesized
gagggctattatggtgggaa

SEQ ID NO: 40333 - DNA, 20 bp, Artificial Sequence
  chemically synthesized
ttatggtgggaaaggccaaa

SEQ ID NO: 40334 - DNA, 20 bp, Artificial Sequence
  chemically synthesized
tggtgggaaaggccaaacag

SEQ ID NO: 40335 - DNA, 20 bp, Artificial Sequence
  chemically synthesized
aaaggccaaacagaagccat

SEQ ID NO: 40336 - DNA, 20 bp, Artificial Sequence
  chemically synthesized
aggccaaacagaagccatta

SEQ ID NO: 40337 - DNA, 20 bp, Artificial Sequence
  chemically synthesized
ccattagagctgtctctacc

SEQ ID NO: 40338 - DNA, 20 bp, Artificial Sequence
  chemically synthesized
caaaaacaatatcccatccc

SEQ ID NO: 40339 - DNA, 20 bp, Artificial Sequence
  chemically synthesized
aaaacaatatcccatccctg

SEQ ID NO: 40340 - DNA, 20 bp, Artificial Sequence
  chemically synthesized
aaacaatatcccatccctgg

SEQ ID NO: 40341 - DNA, 20 bp, Artificial Sequence
  chemically synthesized
aacaatatcccatccctgga

SEQ ID NO: 40342 - DNA, 20 bp, Artificial Sequence
  chemically synthesized
tcccatccctggagggactg

SEQ ID NO: 40343 - DNA, 20 bp, Artificial Sequence
  chemically synthesized
cctggagggactgaagtgat

SEQ ID NO: 40344 - DNA, 20 bp, Artificial Sequence
  chemically synthesized
aagtgattagtgtcaccatc

SEQ ID NO: 40345 - DNA, 20 bp, Artificial Sequence
  chemically synthesized
agtgattagtgtcaccatca

SEQ ID NO: 40346 - DNA, 20 bp, Artificial Sequence
  chemically synthesized
tgtcaccatcaaggacttga

SEQ ID NO: 40347 - DNA, 20 bp, Artificial Sequence
  chemically synthesized
catcaaggacttgaaagacg

SEQ ID NO: 40348 - DNA, 20 bp, Artificial Sequence
  chemically synthesized
atcaaggacttgaaagacgc

SEQ ID NO: 40349 - DNA, 20 bp, Artificial Sequence
  chemically synthesized
tcaaggacttgaaagacgca

SEQ ID NO: 40350 - DNA, 20 bp, Artificial Sequence
  chemically synthesized
caaggacttgaaagacgcag

SEQ ID NO: 40351 - DNA, 20 bp, Artificial Sequence
  chemically synthesized
ggacttgaaagacgcagggg

SEQ ID NO: 40352 - DNA, 20 bp, Artificial Sequence
  chemically synthesized
actctcccatttgacctgtg

SEQ ID NO: 40353 - DNA, 20 bp, Artificial Sequence
  chemically synthesized
tctcccatttgacctgtgca

SEQ ID NO: 40354 - DNA, 20 bp, Artificial Sequence
  chemically synthesized
ctcccatttgacctgtgcag

SEQ ID NO: 40355 - DNA, 20 bp, Artificial Sequence
  chemically synthesized
catttgacctgtgcagagga

SEQ ID NO: 40356 - DNA, 20 bp, Artificial Sequence
  chemically synthesized
tgacctgtgcagaggacaga

SEQ ID NO: 40357 - DNA, 20 bp, Artificial Sequence
  chemically synthesized
tgcagaggacagatggatct

SEQ ID NO: 40358 - DNA, 20 bp, Artificial Sequence
  chemically synthesized
agatggatcttggaaaatga

SEQ ID NO: 40359 - DNA, 20 bp, Artificial Sequence
  chemically synthesized
tggatcttggaaaatgatgg

SEQ ID NO: 40360 - DNA, 20 bp, Artificial Sequence
  chemically synthesized
aaatgatggtggattatttt

SEQ ID NO: 40361 - DNA, 20 bp, Artificial Sequence
  chemically synthesized
ggattattttaagcttaacc

SEQ ID NO: 40362 - DNA, 20 bp, Artificial Sequence
  chemically synthesized
ttattttaagcttaaccaag

SEQ ID NO: 40363 - DNA, 20 bp, Artificial Sequence
  chemically synthesized
ccaagtggtgactccaattg

SEQ ID NO: 40364 - DNA, 20 bp, Artificial Sequence
  chemically synthesized
tccaattgcagctgctctac

SEQ ID NO: 40365 - DNA, 20 bp, Artificial Sequence
  chemically synthesized
tgcagctgctctaccagttg

SEQ ID NO: 40366 - DNA, 20 bp, Artificial Sequence
  chemically synthesized
cagttgtggttttgttgctt

SEQ ID NO: 40367 - DNA, 20 bp, Artificial Sequence
  chemically synthesized
gagcaaattaacacatctcc

SEQ ID NO: 40368 - DNA, 20 bp, Artificial Sequence
  chemically synthesized
ttaacacatctcctggtgcc

SEQ ID NO: 40369 - DNA, 20 bp, Artificial Sequence
  chemically synthesized
atctcctggtgcctggtatg

SEQ ID NO: 40370 - DNA, 20 bp, Artificial Sequence
  chemically synthesized
ggtgcctggtatgcagccat

SEQ ID NO: 40371 - DNA, 20 bp, Artificial Sequence
  chemically synthesized
ctggtatgcagccattggct

SEQ ID NO: 40372 - DNA, 20 bp, Artificial Sequence
  chemically synthesized
tatgcagccattggcttggc

SEQ ID NO: 40373 - DNA, 20 bp, Artificial Sequence
  chemically synthesized
gcagccattggcttggcaag

SEQ ID NO: 40374 - DNA, 20 bp, Artificial Sequence
  chemically synthesized
ttttctccattcctgtccat

SEQ ID NO: 40375 - DNA, 20 bp, Artificial Sequence
  chemically synthesized
ttcctgtccataagacccac

SEQ ID NO: 40376 - DNA, 20 bp, Artificial Sequence
  chemically synthesized
ctgtccataagacccaccag

SEQ ID NO: 40377 - DNA, 20 bp, Artificial Sequence
  chemically synthesized
caccagaagcaatttgcctt

SEQ ID NO: 40378 - DNA, 20 bp, Artificial Sequence
  chemically synthesized
gcaatttgccttcagctgac

SEQ ID NO: 40379 - DNA, 20 bp, Artificial Sequence
  chemically synthesized
caatttgccttcagctgaca

SEQ ID NO: 40380 - DNA, 20 bp, Artificial Sequence
  chemically synthesized
ttgccttcagctgacaaggc

SEQ ID NO: 40381 - DNA, 20 bp, Artificial Sequence
  chemically synthesized
atacctttaccaccctacct

SEQ ID NO: 40382 - DNA, 20 bp, Artificial Sequence
  chemically synthesized
tacctttaccaccctacctc

SEQ ID NO: 40383 - DNA, 20 bp, Artificial Sequence
  chemically synthesized
acctttaccaccctacctca

SEQ ID NO: 40384 - DNA, 20 bp, Artificial Sequence
  chemically synthesized
cctttaccaccctacctcag

SEQ ID NO: 40385 - DNA, 20 bp, Artificial Sequence
  chemically synthesized
tcaggggtgtatcaactctc

SEQ ID NO: 40386 - DNA, 20 bp, Artificial Sequence
  chemically synthesized
ctttgtgtcataatcttatt

SEQ ID NO: 40387 - DNA, 20 bp, Artificial Sequence
  chemically synthesized
ttgtgtcataatcttatttg

SEQ ID NO: 40388 - DNA, 20 bp, Artificial Sequence
  chemically synthesized
gtgtcataatcttatttgga

SEQ ID NO: 40389 - DNA, 20 bp, Artificial Sequence
  chemically synthesized
tgctcgcttttcacttccac

SEQ ID NO: 40390 - DNA, 20 bp, Artificial Sequence
  chemically synthesized
acttccacgagatataacac

SEQ ID NO: 40391 - DNA, 20 bp, Artificial Sequence
  chemically synthesized
attcatgacattatgatgat

SEQ ID NO: 40392 - DNA, 20 bp, Artificial Sequence
  chemically synthesized
gacattatgatgattggata

SEQ ID NO: 40393 - DNA, 20 bp, Artificial Sequence
  chemically synthesized
ttatgatgattggatacagt

SEQ ID NO: 40394 - DNA, 20 bp, Artificial Sequence
  chemically synthesized
gatgattggatacagtgagc

SEQ ID NO: 40395 - DNA, 20 bp, Artificial Sequence
  chemically synthesized
gattggatacagtgagcaag

SEQ ID NO: 40396 - DNA, 20 bp, Artificial Sequence
  chemically synthesized
tggatacagtgagcaagaag

SEQ ID NO: 40397 - DNA, 20 bp, Artificial Sequence
  chemically synthesized
agcaaacacactgaacttat

SEQ ID NO: 40398 - DNA, 20 bp, Artificial Sequence
  chemically synthesized
aacacactgaacttattggt

SEQ ID NO: 40399 - DNA, 20 bp, Artificial Sequence
  chemically synthesized
ttggtgagacatttgtatgc

SEQ ID NO: 40400 - DNA, 20 bp, Artificial Sequence
  chemically synthesized
ggtgagacatttgtatgcca

SEQ ID NO: 40401 - DNA, 20 bp, Artificial Sequence
  chemically synthesized
gtgagacatttgtatgccag

SEQ ID NO: 40402 - DNA, 20 bp, Artificial Sequence
  chemically synthesized
gacatttgtatgccagagga

SEQ ID NO: 40403 - DNA, 20 bp, Artificial Sequence
  chemically synthesized
acatttgtatgccagaggat

SEQ ID NO: 40404 - DNA, 20 bp, Artificial Sequence
  chemically synthesized
cagaggatgggaaataaatc

SEQ ID NO: 40405 - DNA, 20 bp, Artificial Sequence
  chemically synthesized
aaataaatccagctaaaatt

SEQ ID NO: 40406 - DNA, 20 bp, Artificial Sequence
  chemically synthesized
aataaatccagctaaaattt

SEQ ID NO: 40407 - DNA, 20 bp, Artificial Sequence
  chemically synthesized
ataaatccagctaaaattta

SEQ ID NO: 40408 - DNA, 20 bp, Artificial Sequence
  chemically synthesized
aatttagggactttctacct

SEQ ID NO: 40409 - DNA, 20 bp, Artificial Sequence
  chemically synthesized
ttctacctcggtaaaatttc

SEQ ID NO: 40410 - DNA, 20 bp, Artificial Sequence
  chemically synthesized
tctacctcggtaaaatttct

SEQ ID NO: 40411 - DNA, 20 bp, Artificial Sequence
  chemically synthesized
ctacctcggtaaaatttcta

SEQ ID NO: 40412 - DNA, 20 bp, Artificial Sequence
  chemically synthesized
cggtaaaatttctagggttc

SEQ ID NO: 40413 - DNA, 20 bp, Artificial Sequence
  chemically synthesized
taaaatttctagggttccag

SEQ ID NO: 40414 - DNA, 20 bp, Artificial Sequence
  chemically synthesized
ttctagggttccagtggcat

SEQ ID NO: 40415 - DNA, 20 bp, Artificial Sequence
  chemically synthesized
ttccagtggcatgagaccta

SEQ ID NO: 40416 - DNA, 20 bp, Artificial Sequence
  chemically synthesized
ccagtggcatgagacctatg

SEQ ID NO: 40417 - DNA, 20 bp, Artificial Sequence
  chemically synthesized
cctatggagatattccttct

SEQ ID NO: 40418 - DNA, 20 bp, Artificial Sequence
  chemically synthesized
ctatggagatattccttcta

SEQ ID NO: 40419 - DNA, 20 bp, Artificial Sequence
  chemically synthesized
gagatattccttctaaggtg

SEQ ID NO: 40420 - DNA, 20 bp, Artificial Sequence
  chemically synthesized
gaagcataacttgctgcgtt

SEQ ID NO: 40421 - DNA, 20 bp, Artificial Sequence
  chemically synthesized
gtttggcccctcttacaacc

SEQ ID NO: 40422 - DNA, 20 bp, Artificial Sequence
  chemically synthesized
ggcccctcttacaaccaaga

SEQ ID NO: 40423 - DNA, 20 bp, Artificial Sequence
  chemically synthesized
cccctcttacaaccaagaaa

SEQ ID NO: 40424 - DNA, 20 bp, Artificial Sequence
  chemically synthesized
ccctcttacaaccaagaaag

SEQ ID NO: 40425 - DNA, 20 bp, Artificial Sequence
  chemically synthesized
caagaaagaggcacaatgcc

SEQ ID NO: 40426 - DNA, 20 bp, Artificial Sequence
  chemically synthesized
gaaagaggcacaatgcctgg

SEQ ID NO: 40427 - DNA, 20 bp, Artificial Sequence
  chemically synthesized
aaagaggcacaatgcctggt

SEQ ID NO: 40428 - DNA, 20 bp, Artificial Sequence
  chemically synthesized
caatgcctggtgggcctatt

SEQ ID NO: 40429 - DNA, 20 bp, Artificial Sequence
  chemically synthesized
tggtgggcctatttggattt

SEQ ID NO: 40430 - DNA, 20 bp, Artificial Sequence
  chemically synthesized
gtgggcctatttggattttg

SEQ ID NO: 40431 - DNA, 20 bp, Artificial Sequence
  chemically synthesized
tgggcctatttggattttgg

SEQ ID NO: 40432 - DNA, 20 bp, Artificial Sequence
  chemically synthesized
gaggcaacacattcctcgtt

SEQ ID NO: 40433 - DNA, 20 bp, Artificial Sequence
  chemically synthesized
aggcaacacattcctcgttt

SEQ ID NO: 40434 - DNA, 20 bp, Artificial Sequence
  chemically synthesized
ctcgtttgggtgtgttactc

SEQ ID NO: 40435 - DNA, 20 bp, Artificial Sequence
  chemically synthesized
gttactctggcccatttatc

SEQ ID NO: 40436 - DNA, 20 bp, Artificial Sequence
  chemically synthesized
ccatttatcgagtgacctga

SEQ ID NO: 40437 - DNA, 20 bp, Artificial Sequence
  chemically synthesized
catttatcgagtgacctgaa

SEQ ID NO: 40438 - DNA, 20 bp, Artificial Sequence
  chemically synthesized
cgagtgacctgaaaggctgc

SEQ ID NO: 40439 - DNA, 20 bp, Artificial Sequence
  chemically synthesized
cctgaaaggctgccagattt

SEQ ID NO: 40440 - DNA, 20 bp, Artificial Sequence
  chemically synthesized
aaggctgccagatttaagtg

SEQ ID NO: 40441 - DNA, 20 bp, Artificial Sequence
  chemically synthesized
tgccagatttaagtgcagtc

SEQ ID NO: 40442 - DNA, 20 bp, Artificial Sequence
  chemically synthesized
ttaagtgcagtctagaacaa

SEQ ID NO: 40443 - DNA, 20 bp, Artificial Sequence
  chemically synthesized
agtgcagtctagaacaaaag

SEQ ID NO: 40444 - DNA, 20 bp, Artificial Sequence
  chemically synthesized
gtgcagtctagaacaaaaga

SEQ ID NO: 40445 - DNA, 20 bp, Artificial Sequence
  chemically synthesized
aacaaaagaaggctctgaaa

SEQ ID NO: 40446 - DNA, 20 bp, Artificial Sequence
  chemically synthesized
acaaaagaaggctctgaaac

SEQ ID NO: 40447 - DNA, 20 bp, Artificial Sequence
  chemically synthesized
agaaggctctgaaacaggtc

SEQ ID NO: 40448 - DNA, 20 bp, Artificial Sequence
  chemically synthesized
gaaggctctgaaacaggtcc

SEQ ID NO: 40449 - DNA, 20 bp, Artificial Sequence
  chemically synthesized
acaggtccaggctgctgtga

SEQ ID NO: 40450 - DNA, 20 bp, Artificial Sequence
  chemically synthesized
gtgaaagctgctctgccatt

SEQ ID NO: 40451 - DNA, 20 bp, Artificial Sequence
  chemically synthesized
tgaaagctgctctgccattt

SEQ ID NO: 40452 - DNA, 20 bp, Artificial Sequence
  chemically synthesized
atttgggccacatgaccccg

SEQ ID NO: 40453 - DNA, 20 bp, Artificial Sequence
  chemically synthesized
acatgaccccgcagatccaa

SEQ ID NO: 40454 - DNA, 20 bp, Artificial Sequence
  chemically synthesized
ccgcagatccaatggtgctt

SEQ ID NO: 40455 - DNA, 20 bp, Artificial Sequence
  chemically synthesized
cgcagatccaatggtgcttg

SEQ ID NO: 40456 - DNA, 20 bp, Artificial Sequence
  chemically synthesized
tccaatggtgcttgaggtgt

SEQ ID NO: 40457 - DNA, 20 bp, Artificial Sequence
  chemically synthesized
aatggtgcttgaggtgtcag

SEQ ID NO: 40458 - DNA, 20 bp, Artificial Sequence
  chemically synthesized
ggtgcttgaggtgtcagtgg

SEQ ID NO: 40459 - DNA, 20 bp, Artificial Sequence
  chemically synthesized
cttgaggtgtcagtggcaga

SEQ ID NO: 40460 - DNA, 20 bp, Artificial Sequence
  chemically synthesized
ttgaggtgtcagtggcagat

SEQ ID NO: 40461 - DNA, 20 bp, Artificial Sequence
  chemically synthesized
tgaggtgtcagtggcagata

SEQ ID NO: 40462 - DNA, 20 bp, Artificial Sequence
  chemically synthesized
tggcagatagggatgctgtt

SEQ ID NO: 40463 - DNA, 20 bp, Artificial Sequence
  chemically synthesized
gcagatagggatgctgtttg

SEQ ID NO: 40464 - DNA, 20 bp, Artificial Sequence
  chemically synthesized
gggatgctgtttggagcctt

SEQ ID NO: 40465 - DNA, 20 bp, Artificial Sequence
  chemically synthesized
atgctgtttggagcctttgg

SEQ ID NO: 40466 - DNA, 20 bp, Artificial Sequence
  chemically synthesized
tgctgtttggagcctttggc

SEQ ID NO: 40467 - DNA, 20 bp, Artificial Sequence
  chemically synthesized
gagcctttggcaggccccca

SEQ ID NO: 40468 - DNA, 20 bp, Artificial Sequence
  chemically synthesized
agcctttggcaggcccccat

SEQ ID NO: 40469 - DNA, 20 bp, Artificial Sequence
  chemically synthesized
aggcccccataggtgaatca

SEQ ID NO: 40470 - DNA, 20 bp, Artificial Sequence
  chemically synthesized
cccccataggtgaatcacag

SEQ ID NO: 40471 - DNA, 20 bp, Artificial Sequence
  chemically synthesized
cccataggtgaatcacagtg

SEQ ID NO: 40472 - DNA, 20 bp, Artificial Sequence
  chemically synthesized
tgaatcacagtggagacctc

SEQ ID NO: 40473 - DNA, 20 bp, Artificial Sequence
  chemically synthesized
gaatcacagtggagacctct

SEQ ID NO: 40474 - DNA, 20 bp, Artificial Sequence
  chemically synthesized
agtggagacctctaggattt

SEQ ID NO: 40475 - DNA, 20 bp, Artificial Sequence
  chemically synthesized
tggagacctctaggattttg

SEQ ID NO: 40476 - DNA, 20 bp, Artificial Sequence
  chemically synthesized
gacctctaggattttggagc

SEQ ID NO: 40477 - DNA, 20 bp, Artificial Sequence
  chemically synthesized
acctctaggattttggagca

SEQ ID NO: 40478 - DNA, 20 bp, Artificial Sequence
  chemically synthesized
gcaaggccctgccacttctg

SEQ ID NO: 40479 - DNA, 20 bp, Artificial Sequence
  chemically synthesized
cagataactactctcctttt

SEQ ID NO: 40480 - DNA, 20 bp, Artificial Sequence
  chemically synthesized
gataactactctccttttga

SEQ ID NO: 40481 - DNA, 20 bp, Artificial Sequence
  chemically synthesized
actactctccttttgagaga

SEQ ID NO: 40482 - DNA, 20 bp, Artificial Sequence
  chemically synthesized
tccttttgagagacagctat

SEQ ID NO: 40483 - DNA, 20 bp, Artificial Sequence
  chemically synthesized
gacagctattggtctgttat

SEQ ID NO: 40484 - DNA, 20 bp, Artificial Sequence
  chemically synthesized
acagctattggtctgttatt

SEQ ID NO: 40485 - DNA, 20 bp, Artificial Sequence
  chemically synthesized
attggtctgttattgggctt

SEQ ID NO: 40486 - DNA, 20 bp, Artificial Sequence
  chemically synthesized
ggtctgttattgggctttgg

SEQ ID NO: 40487 - DNA, 20 bp, Artificial Sequence
  chemically synthesized
ggtaactgaacgtttgactg

SEQ ID NO: 40488 - DNA, 20 bp, Artificial Sequence
  chemically synthesized
gtaactgaacgtttgactgt

SEQ ID NO: 40489 - DNA, 20 bp, Artificial Sequence
  chemically synthesized
acgtttgactgtgggtcata

SEQ ID NO: 40490 - DNA, 20 bp, Artificial Sequence
  chemically synthesized
tgaacctgcctatcatgaac

SEQ ID NO: 40491 - DNA, 20 bp, Artificial Sequence
  chemically synthesized
tggttgctttctgacccatc

SEQ ID NO: 40492 - DNA, 20 bp, Artificial Sequence
  chemically synthesized
ttctgacccatctagccatg

SEQ ID NO: 40493 - DNA, 20 bp, Artificial Sequence
  chemically synthesized
tgacccatctagccatgaag

SEQ ID NO: 40494 - DNA, 20 bp, Artificial Sequence
  chemically synthesized
gacccatctagccatgaagt

SEQ ID NO: 40495 - DNA, 20 bp, Artificial Sequence
  chemically synthesized
catctagccatgaagtgggt

SEQ ID NO: 40496 - DNA, 20 bp, Artificial Sequence
  chemically synthesized
agccatgaagtgggtcagca

SEQ ID NO: 40497 - DNA, 20 bp, Artificial Sequence
  chemically synthesized
catgaagtgggtcagcacag

SEQ ID NO: 40498 - DNA, 20 bp, Artificial Sequence
  chemically synthesized
ggcatttcatcatcaaattg

SEQ ID NO: 40499 - DNA, 20 bp, Artificial Sequence
  chemically synthesized
atttcatcatcaaattgaag

SEQ ID NO: 40500 - DNA, 20 bp, Artificial Sequence
  chemically synthesized
tgaagtggtgtgtatgtgat

SEQ ID NO: 40501 - DNA, 20 bp, Artificial Sequence
  chemically synthesized
gaagtggtgtgtatgtgatc

SEQ ID NO: 40502 - DNA, 20 bp, Artificial Sequence
  chemically synthesized
gtgtgtatgtgatcgggctt

SEQ ID NO: 40503 - DNA, 20 bp, Artificial Sequence
  chemically synthesized
tgtatgtgatcgggcttgag

SEQ ID NO: 40504 - DNA, 20 bp, Artificial Sequence
  chemically synthesized
gtatgtgatcgggcttgagc

SEQ ID NO: 40505 - DNA, 20 bp, Artificial Sequence
  chemically synthesized
tcgggcttgagcaggtcctg

SEQ ID NO: 40506 - DNA, 20 bp, Artificial Sequence
  chemically synthesized
cgggcttgagcaggtcctga

SEQ ID NO: 40507 - DNA, 20 bp, Artificial Sequence
  chemically synthesized
tgagcaggtcctgaaggcac

SEQ ID NO: 40508 - DNA, 20 bp, Artificial Sequence
  chemically synthesized
caggtcctgaaggcacaagt

SEQ ID NO: 40509 - DNA, 20 bp, Artificial Sequence
  chemically synthesized
aaggcacaagtaagttacat

SEQ ID NO: 40510 - DNA, 20 bp, Artificial Sequence
  chemically synthesized
aggcacaagtaagttacata

SEQ ID NO: 40511 - DNA, 20 bp, Artificial Sequence
  chemically synthesized
cacaagtaagttacataagg

SEQ ID NO: 40512 - DNA, 20 bp, Artificial Sequence
  chemically synthesized
aagtaagttacataaggaag

SEQ ID NO: 40513 - DNA, 20 bp, Artificial Sequence
  chemically synthesized
ccaccctgccttccctcccc

SEQ ID NO: 40514 - DNA, 20 bp, Artificial Sequence
  chemically synthesized
cctcccccagcctgcaccaa

SEQ ID NO: 40515 - DNA, 20 bp, Artificial Sequence
  chemically synthesized
agcctgcaccaatggcctca

SEQ ID NO: 40516 - DNA, 20 bp, Artificial Sequence
  chemically synthesized
gcctgcaccaatggcctcat

SEQ ID NO: 40517 - DNA, 20 bp, Artificial Sequence
  chemically synthesized
cctgcaccaatggcctcatg

SEQ ID NO: 40518 - DNA, 20 bp, Artificial Sequence
  chemically synthesized
tgcaccaatggcctcatggg

SEQ ID NO: 40519 - DNA, 20 bp, Artificial Sequence
  chemically synthesized
catggggagttccctatgat

SEQ ID NO: 40520 - DNA, 20 bp, Artificial Sequence
  chemically synthesized
agttccctatgatcagttga

SEQ ID NO: 40521 - DNA, 20 bp, Artificial Sequence
  chemically synthesized
ttccctatgatcagttgaca

SEQ ID NO: 40522 - DNA, 20 bp, Artificial Sequence
  chemically synthesized
tccctatgatcagttgacag

SEQ ID NO: 40523 - DNA, 20 bp, Artificial Sequence
  chemically synthesized
ctatgatcagttgacagagg

SEQ ID NO: 40524 - DNA, 20 bp, Artificial Sequence
  chemically synthesized
tatgatcagttgacagagga

SEQ ID NO: 40525 - DNA, 20 bp, Artificial Sequence
  chemically synthesized
atgatcagttgacagaggaa

SEQ ID NO: 40526 - DNA, 20 bp, Artificial Sequence
  chemically synthesized
atcagttgacagaggaaggg

SEQ ID NO: 40527 - DNA, 20 bp, Artificial Sequence
  chemically synthesized
tgacagaggaagggaagact

SEQ ID NO: 40528 - DNA, 20 bp, Artificial Sequence
  chemically synthesized
gacagaggaagggaagacta

SEQ ID NO: 40529 - DNA, 20 bp, Artificial Sequence
  chemically synthesized
aggaagggaagactaaggac

SEQ ID NO: 40530 - DNA, 20 bp, Artificial Sequence
  chemically synthesized
gaagactaaggactggttca

SEQ ID NO: 40531 - DNA, 20 bp, Artificial Sequence
  chemically synthesized
actaaggactggttcataga

SEQ ID NO: 40532 - DNA, 20 bp, Artificial Sequence
  chemically synthesized
agatggttctgcacgatatg

SEQ ID NO: 40533 - DNA, 20 bp, Artificial Sequence
  chemically synthesized
gatggttctgcacgatatgc

SEQ ID NO: 40534 - DNA, 20 bp, Artificial Sequence
  chemically synthesized
gatatgcaggcaccacccga

SEQ ID NO: 40535 - DNA, 20 bp, Artificial Sequence
  chemically synthesized
atgcaggcaccacccgaaag

SEQ ID NO: 40536 - DNA, 20 bp, Artificial Sequence
  chemically synthesized
aggcaccacccgaaagtgga

SEQ ID NO: 40537 - DNA, 20 bp, Artificial Sequence
  chemically synthesized
cacccgaaagtggacagctg

SEQ ID NO: 40538 - DNA, 20 bp, Artificial Sequence
  chemically synthesized
tgcatgtgtacacttgtgct

SEQ ID NO: 40539 - DNA, 20 bp, Artificial Sequence
  chemically synthesized
tttcctttatcatgtgacct

SEQ ID NO: 40540 - DNA, 20 bp, Artificial Sequence
  chemically synthesized
atcatgtgaccttagattta

SEQ ID NO: 40541 - DNA, 20 bp, Artificial Sequence
  chemically synthesized
tagatttatggacttcacat

SEQ ID NO: 40542 - DNA, 20 bp, Artificial Sequence
  chemically synthesized
tggacttcacatcagcattt

SEQ ID NO: 40543 - DNA, 20 bp, Artificial Sequence
  chemically synthesized
acatcagcatttaagcattt

SEQ ID NO: 40544 - DNA, 20 bp, Artificial Sequence
  chemically synthesized
catttaagtgttgttcatat

SEQ ID NO: 40545 - DNA, 20 bp, Artificial Sequence
  chemically synthesized
taaccttatgtaataacttt

SEQ ID NO: 40546 - DNA, 20 bp, Artificial Sequence
  chemically synthesized
ttatgtaataacttttggtt

SEQ ID NO: 40547 - DNA, 20 bp, Artificial Sequence
  chemically synthesized
tatgtaataacttttggttt

SEQ ID NO: 40548 - DNA, 20 bp, Artificial Sequence
  chemically synthesized
atgtaataacttttggtttg

SEQ ID NO: 40549 - DNA, 20 bp, Artificial Sequence
  chemically synthesized
ataacttttggtttggggat

SEQ ID NO: 40550 - DNA, 20 bp, Artificial Sequence
  chemically synthesized
tttggggattggtgcgtttc

SEQ ID NO: 40551 - DNA, 20 bp, Artificial Sequence
  chemically synthesized
tggtgcgtttctggttgtat

SEQ ID NO: 40552 - DNA, 20 bp, Artificial Sequence
  chemically synthesized
ggtgcgtttctggttgtatg

SEQ ID NO: 40553 - DNA, 20 bp, Artificial Sequence
  chemically synthesized
cgtttctggttgtatgagga

SEQ ID NO: 40554 - DNA, 20 bp, Artificial Sequence
  chemically synthesized
tgaggatagttgtattatat

SEQ ID NO: 40555 - DNA, 20 bp, Artificial Sequence
  chemically synthesized
gaggatagttgtattatatt

SEQ ID NO: 40556 - DNA, 20 bp, Artificial Sequence
  chemically synthesized
cttattattgtctttatttg

SEQ ID NO: 40557 - DNA, 20 bp, Artificial Sequence
  chemically synthesized
ttgaagattatgtatgattt

SEQ ID NO: 40558 - DNA, 20 bp, Artificial Sequence
  chemically synthesized
tgaagattatgtatgatttc

SEQ ID NO: 40559 - DNA, 20 bp, Artificial Sequence
  chemically synthesized
atgatttcaggatgtgtgta

SEQ ID NO: 40560 - DNA, 20 bp, Artificial Sequence
  chemically synthesized
tgatttcaggatgtgtgtat

SEQ ID NO: 40561 - DNA, 20 bp, Artificial Sequence
  chemically synthesized
caggatgtgtgtatgggttc

SEQ ID NO: 40562 - DNA, 20 bp, Artificial Sequence
  chemically synthesized
gtgtatgggttcaagttgac

SEQ ID NO: 40563 - DNA, 20 bp, Artificial Sequence
  chemically synthesized
tgtatgggttcaagttgaca

SEQ ID NO: 40564 - DNA, 20 bp, Artificial Sequence
  chemically synthesized
tatgggttcaagttgacaag

SEQ ID NO: 40565 - DNA, 20 bp, Artificial Sequence
  chemically synthesized
ggttcaagttgacaaggagt

SEQ ID NO: 40566 - DNA, 20 bp, Artificial Sequence
  chemically synthesized
acaaggagttggacttgtga

SEQ ID NO: 40567 - DNA, 20 bp, Artificial Sequence
  chemically synthesized
gttaatactgtcaacttgat

SEQ ID NO: 40568 - DNA, 20 bp, Artificial Sequence
  chemically synthesized
tgtcaacttgattggattga

SEQ ID NO: 40569 - DNA, 20 bp, Artificial Sequence
  chemically synthesized
tgattggattgaaagatgca

SEQ ID NO: 40570 - DNA, 20 bp, Artificial Sequence
  chemically synthesized
aagatgcaaagtattaatct

SEQ ID NO: 40571 - DNA, 20 bp, Artificial Sequence
  chemically synthesized
ttaatctcggttatgtctgt

SEQ ID NO: 40572 - DNA, 20 bp, Artificial Sequence
  chemically synthesized
taatctcggttatgtctgtg

SEQ ID NO: 40573 - DNA, 20 bp, Artificial Sequence
  chemically synthesized
aatctcggttatgtctgtga

SEQ ID NO: 40574 - DNA, 20 bp, Artificial Sequence
  chemically synthesized
cggttatgtctgtgagggtg

SEQ ID NO: 40575 - DNA, 20 bp, Artificial Sequence
  chemically synthesized
tgtctgtgagggtgtggcaa

SEQ ID NO: 40576 - DNA, 20 bp, Artificial Sequence
  chemically synthesized
gtctgtgagggtgtggcaaa

SEQ ID NO: 40577 - DNA, 20 bp, Artificial Sequence
  chemically synthesized
ctgtgagggtgtggcaaaag

SEQ ID NO: 40578 - DNA, 20 bp, Artificial Sequence
  chemically synthesized
gcaaaaggagattaacattt

SEQ ID NO: 40579 - DNA, 20 bp, Artificial Sequence
  chemically synthesized
aaggagattaacatttgagt

SEQ ID NO: 40580 - DNA, 20 bp, Artificial Sequence
  chemically synthesized
gagattaacatttgagtcag

SEQ ID NO: 40581 - DNA, 20 bp, Artificial Sequence
  chemically synthesized
agattaacatttgagtcagt

SEQ ID NO: 40582 - DNA, 20 bp, Artificial Sequence
  chemically synthesized
taacatttgagtcagtgggc

SEQ ID NO: 40583 - DNA, 20 bp, Artificial Sequence
  chemically synthesized
aacatttgagtcagtgggct

SEQ ID NO: 40584 - DNA, 20 bp, Artificial Sequence
  chemically synthesized
tgtacacatgcatttagaaa

SEQ ID NO: 40585 - DNA, 20 bp, Artificial Sequence
  chemically synthesized
agtgctgcagctgtccactt

SEQ ID NO: 40586 - DNA, 20 bp, Artificial Sequence
  chemically synthesized
gcaggctgggggagggaagg

SEQ ID NO: 40587 - DNA, 20 bp, Artificial Sequence
  chemically synthesized
gggagggaaggcagggtggc

SEQ ID NO: 40588 - DNA, 20 bp, Artificial Sequence
  chemically synthesized
ctgacccacttcatggctag

SEQ ID NO: 40589 - DNA, 20 bp, Artificial Sequence
  chemically synthesized
caatagctgtctctcaaaag

SEQ ID NO: 40590 - DNA, 20 bp, Artificial Sequence
  chemically synthesized
cactgacacctcaagcacca

SEQ ID NO: 40591 - DNA, 20 bp, Artificial Sequence
  chemically synthesized
ctcaagcaccattggatctg

SEQ ID NO: 40592 - DNA, 20 bp, Artificial Sequence
  chemically synthesized
aggtcactcgataaatgggc

SEQ ID NO: 40593 - DNA, 20 bp, Artificial Sequence
  chemically synthesized
cagagtaacacacccaaacg

SEQ ID NO: 40594 - DNA, 20 bp, Artificial Sequence
  chemically synthesized
aagttatgcttcaccttaga

SEQ ID NO: 40595 - DNA, 20 bp, Artificial Sequence
  chemically synthesized
agaaagtccctaaattttag

SEQ ID NO: 40596 - DNA, 20 bp, Artificial Sequence
  chemically synthesized
tatccaatcatcataatgtc

SEQ ID NO: 40597 - DNA, 20 bp, Artificial Sequence
  chemically synthesized
aagattatgacacaaagctg

SEQ ID NO: 40598 - DNA, 20 bp, Artificial Sequence
  chemically synthesized
gagttgatacacccctgagg

SEQ ID NO: 40599 - DNA, 20 bp, Artificial Sequence
  chemically synthesized
ctgaaggcaaattgcttctg

SEQ ID NO: 40600 - DNA, 20 bp, Artificial Sequence
  chemically synthesized
ttctggtgggtcttatggac

SEQ ID NO: 40601 - DNA, 20 bp, Artificial Sequence
  chemically synthesized
actggtagagcagctgcaat

SEQ ID NO: 40602 - DNA, 20 bp, Artificial Sequence
  chemically synthesized
cctctgcacaggtcaaatgg

SEQ ID NO: 40603 - DNA, 20 bp, Artificial Sequence
  chemically synthesized
gtcaaatgggagagttgaac

SEQ ID NO: 40604 - DNA, 20 bp, Artificial Sequence
  chemically synthesized
gagttgaacagggatgtggt

SEQ ID NO: 40605 - DNA, 20 bp, Artificial Sequence
  chemically synthesized
ctaatcacttcagtccctcc

SEQ ID NO: 40606 - DNA, 20 bp, Artificial Sequence
  chemically synthesized
cacttcagtccctccaggga

SEQ ID NO: 40607 - DNA, 20 bp, Artificial Sequence
  chemically synthesized
tggcactgggaaaatgacca

SEQ ID NO: 40608 - DNA, 20 bp, Artificial Sequence
  chemically synthesized
tggggaaccacaataacgtt

SEQ ID NO: 40609 - DNA, 20 bp, Artificial Sequence
  chemically synthesized
caataacgttttgggtaccc

SEQ ID NO: 40610 - DNA, 20 bp, Artificial Sequence
  chemically synthesized
ggccagaggtctccttaggg

SEQ ID NO: 40611 - DNA, 20 bp, Artificial Sequence
  chemically synthesized
ccttagggaaggatgggaga

SEQ ID NO: 40612 - DNA, 20 bp, Artificial Sequence
  chemically synthesized
ctagtggtgtccttcctcaa

SEQ ID NO: 40613 - DNA, 20 bp, Artificial Sequence
  chemically synthesized
tccagcctccccttcattca

SEQ ID NO: 40614 - DNA, 20 bp, Artificial Sequence
  chemically synthesized
gttctggaactgtaacaggt

SEQ ID NO: 40615 - DNA, 20 bp, Artificial Sequence
  chemically synthesized
tttgtttatataaatcaagt

SEQ ID NO: 40616 - DNA, 20 bp, Artificial Sequence
  chemically synthesized
agccaatgccagagctctac

SEQ ID NO: 40617 - DNA, 20 bp, Artificial Sequence
  chemically synthesized
acacttggcccctgccacct

SEQ ID NO: 40618 - DNA, 20 bp, Artificial Sequence
  chemically synthesized
attgtatttaaattttgtag

SEQ ID NO: 40619 - DNA, 20 bp, Artificial Sequence
  chemically synthesized
tatttcacaaagcttcggcc

SEQ ID NO: 40620 - DNA, 20 bp, Artificial Sequence
  chemically synthesized
atcttctggaccctcccagc

SEQ ID NO: 40621 - DNA, 20 bp, Artificial Sequence
  chemically synthesized
tctggaccctcccagctggg

SEQ ID NO: 40622 - DNA, 20 bp, Artificial Sequence
  chemically synthesized
atcctaatctccctaagcct

SEQ ID NO: 40623 - DNA, 20 bp, Artificial Sequence
  chemically synthesized
tttttttttttttttggaaa

SEQ ID NO: 40624 - DNA, 20 bp, Artificial Sequence
  chemically synthesized
gtcttgctctgttaccaggc

SEQ ID NO: 40625 - DNA, 20 bp, Artificial Sequence
  chemically synthesized
ttttgtatttttagcagaga

SEQ ID NO: 40626 - DNA, 20 bp, Artificial Sequence
  chemically synthesized
tggggtttcaccattttagc

SEQ ID NO: 40627 - DNA, 20 bp, Artificial Sequence
  chemically synthesized
gcccccgcctcccaaggtgc

SEQ ID NO: 40628 - DNA, 20 bp, Artificial Sequence
  chemically synthesized
ccgagctgcaacattaaatg

SEQ ID NO: 40629 - DNA, 20 bp, Artificial Sequence
  chemically synthesized
gaaagcttaagcagttcttt

SEQ ID NO: 40630 - DNA, 20 bp, Artificial Sequence
  chemically synthesized
agagtataatgcacctcctc

SEQ ID NO: 40631 - DNA, 20 bp, Artificial Sequence
  chemically synthesized
cctcacctctggggcccgca

SEQ ID NO: 40632 - DNA, 20 bp, Artificial Sequence
  chemically synthesized
tagaagcattcaggggcatt

SEQ ID NO: 40633 - DNA, 20 bp, Artificial Sequence
  chemically synthesized
cattaggggtgcctcttgag

SEQ ID NO: 40634 - DNA, 20 bp, Artificial Sequence
  chemically synthesized
cactgttgcctcaagcagtg

SEQ ID NO: 40635 - DNA, 20 bp, Artificial Sequence
  chemically synthesized
gtggaaaggctaatggcagc

SEQ ID NO: 40636 - DNA, 20 bp, Artificial Sequence
  chemically synthesized
atggcagcacgggtcaggga

SEQ ID NO: 40637 - DNA, 20 bp, Artificial Sequence
  chemically synthesized
gaggggatgttaccactact

SEQ ID NO: 40638 - DNA, 20 bp, Artificial Sequence
  chemically synthesized
ttctggcaaaaaagtttcat

SEQ ID NO: 40639 - DNA, 20 bp, Artificial Sequence
  chemically synthesized
ctcagtgtcctcagcttcat

SEQ ID NO: 40640 - DNA, 20 bp, Artificial Sequence
  chemically synthesized
cacatccccactccaagttc

SEQ ID NO: 40641 - DNA, 20 bp, Artificial Sequence
  chemically synthesized
aatttcaactctttctctac

SEQ ID NO: 40642 - DNA, 20 bp, Artificial Sequence
  chemically synthesized
atagtcaaaggtattatgta

SEQ ID NO: 40643 - DNA, 20 bp, Artificial Sequence
  chemically synthesized
ctccttgcctctcataagtg

SEQ ID NO: 40644 - DNA, 20 bp, Artificial Sequence
  chemically synthesized
gttctccatactattagaag

SEQ ID NO: 40645 - DNA, 20 bp, Artificial Sequence
  chemically synthesized
agaagtcccaaaaccaatga

SEQ ID NO: 40646 - DNA, 20 bp, Artificial Sequence
  chemically synthesized
gtatgaaaatctgtattagt

SEQ ID NO: 40647 - DNA, 20 bp, Artificial Sequence
  chemically synthesized
atatatgagagagagagaga

SEQ ID NO: 40648 - DNA, 20 bp, Artificial Sequence
  chemically synthesized
tgtatatatgtgtatatata

SEQ ID NO: 40649 - DNA, 20 bp, Artificial Sequence
  chemically synthesized
agtcccacagctgaagaact

SEQ ID NO: 40650 - DNA, 20 bp, Artificial Sequence
  chemically synthesized
gtccgatgttcaagagcagg

SEQ ID NO: 40651 - DNA, 20 bp, Artificial Sequence
  chemically synthesized
ggcagcaggggcaggggcct

SEQ ID NO: 40652 - DNA, 20 bp, Artificial Sequence
  chemically synthesized
aggggcctcagggtgcttgc

SEQ ID NO: 40653 - DNA, 20 bp, Artificial Sequence
  chemically synthesized
acacactggcctcttttcca

SEQ ID NO: 40654 - DNA, 20 bp, Artificial Sequence
  chemically synthesized
atagggtggctggggcacac

SEQ ID NO: 40655 - DNA, 20 bp, Artificial Sequence
  chemically synthesized
tggctggggcacactggggt

SEQ ID NO: 40656 - DNA, 20 bp, Artificial Sequence
  chemically synthesized
tggggtgtgagtaaagcact

SEQ ID NO: 40657 - DNA, 20 bp, Artificial Sequence
  chemically synthesized
agcttcaccccacaaaaaca

SEQ ID NO: 40658 - DNA, 20 bp, Artificial Sequence
  chemically synthesized
cagccagtggaaatgttcaa

SEQ ID NO: 40659 - DNA, 20 bp, Artificial Sequence
  chemically synthesized
gccaggagccttgcctggtg

SEQ ID NO: 40660 - DNA, 20 bp, Artificial Sequence
  chemically synthesized
agctcacaagaaagagaaac

SEQ ID NO: 40661 - DNA, 20 bp, Artificial Sequence
  chemically synthesized
gctgaaatggcagaggggct

SEQ ID NO: 40662 - DNA, 20 bp, Artificial Sequence
  chemically synthesized
gaggggctgtgggttgtctc

SEQ ID NO: 40663 - DNA, 20 bp, Artificial Sequence
  chemically synthesized
ctaaaatgttcaggcagggc

SEQ ID NO: 40664 - DNA, 20 bp, Artificial Sequence
  chemically synthesized
tggctgtgctctgcccagtg

SEQ ID NO: 40665 - DNA, 20 bp, Artificial Sequence
  chemically synthesized
acactgtgctggaggtccgt

SEQ ID NO: 40666 - DNA, 20 bp, Artificial Sequence
  chemically synthesized
tgagcccatactttaatctc

SEQ ID NO: 40667 - DNA, 20 bp, Artificial Sequence
  chemically synthesized
gtggtaaggaagaaagtaca

SEQ ID NO: 40668 - DNA, 20 bp, Artificial Sequence
  chemically synthesized
caatattgcaaatcattatt

SEQ ID NO: 40669 - DNA, 20 bp, Artificial Sequence
  chemically synthesized
ctgtgatacaggtgtttgat

SEQ ID NO: 40670 - DNA, 20 bp, Artificial Sequence
  chemically synthesized
actgcaaccgtgtatctctt

SEQ ID NO: 40671 - DNA, 20 bp, Artificial Sequence
  chemically synthesized
tcatgtctagcatgcaggac

SEQ ID NO: 40672 - DNA, 20 bp, Artificial Sequence
  chemically synthesized
tgcaggacttgggtaatctc

SEQ ID NO: 40673 - DNA, 20 bp, Artificial Sequence
  chemically synthesized
ctaaccataaaatcttaaat

SEQ ID NO: 40674 - DNA, 20 bp, Artificial Sequence
  chemically synthesized
tgacagttgataagcatctt

SEQ ID NO: 40675 - DNA, 20 bp, Artificial Sequence
  chemically synthesized
agttacaaaaatgttggtgc

SEQ ID NO: 40676 - DNA, 20 bp, Artificial Sequence
  chemically synthesized
gttggtgcatggatgatgtt

SEQ ID NO: 40677 - DNA, 20 bp, Artificial Sequence
  chemically synthesized
aattaagcaaaaaaaaaatg

SEQ ID NO: 40678 - DNA, 20 bp, Artificial Sequence
  chemically synthesized
acacaccactattagttggg

SEQ ID NO: 40679 - DNA, 20 bp, Artificial Sequence
  chemically synthesized
ctttctgcctggttgtggca

SEQ ID NO: 40680 - DNA, 20 bp, Artificial Sequence
  chemically synthesized
acaaaatgtagtgattttca

SEQ ID NO: 40681 - DNA, 20 bp, Artificial Sequence
  chemically synthesized
tgaagatagccaagcttcca

SEQ ID NO: 40682 - DNA, 20 bp, Artificial Sequence
  chemically synthesized
ggacaaccttgaccactttg

SEQ ID NO: 40683 - DNA, 20 bp, Artificial Sequence
  chemically synthesized
tggtgggggccacatgcaga

SEQ ID NO: 40684 - DNA, 20 bp, Artificial Sequence
  chemically synthesized
gggggccacatgcagatgga

SEQ ID NO: 40685 - DNA, 20 bp, Artificial Sequence
  chemically synthesized
catgcagatggagtgggtta

SEQ ID NO: 40686 - DNA, 20 bp, Artificial Sequence
  chemically synthesized
agagtgactagaagagcagt

SEQ ID NO: 40687 - DNA, 20 bp, Artificial Sequence
  chemically synthesized
tgaaagcagcgagacttcta

SEQ ID NO: 40688 - DNA, 20 bp, Artificial Sequence
  chemically synthesized
agcgagacttctagggaata

SEQ ID NO: 40689 - DNA, 20 bp, Artificial Sequence
  chemically synthesized
aaggcctgtcctgacctcct

SEQ ID NO: 40690 - DNA, 20 bp, Artificial Sequence
  chemically synthesized
catgagggcagggcaaggag

SEQ ID NO: 40691 - DNA, 20 bp, Artificial Sequence
  chemically synthesized
atatgctctatgctggaaaa

SEQ ID NO: 40692 - DNA, 20 bp, Artificial Sequence
  chemically synthesized
tttgaactctcttttccagg

SEQ ID NO: 40693 - DNA, 20 bp, Artificial Sequence
  chemically synthesized
ttttccaggaagagttgtgc

SEQ ID NO: 40694 - DNA, 20 bp, Artificial Sequence
  chemically synthesized
ttaataaggtgcttcctaca

SEQ ID NO: 40695 - DNA, 20 bp, Artificial Sequence
  chemically synthesized
gagttcagttaaacattttg

SEQ ID NO: 40696 - DNA, 20 bp, Artificial Sequence
  chemically synthesized
tgctaggaaatatcccaaaa

SEQ ID NO: 40697 - DNA, 20 bp, Artificial Sequence
  chemically synthesized
tccagggctcatatggcaat

SEQ ID NO: 40698 - DNA, 20 bp, Artificial Sequence
  chemically synthesized
atatggcaatggggatttaa

SEQ ID NO: 40699 - DNA, 20 bp, Artificial Sequence
  chemically synthesized
atgtattttattaatggtgt

SEQ ID NO: 40700 - DNA, 20 bp, Artificial Sequence
  chemically synthesized
tttcttcctcactgtggtgt

SEQ ID NO: 40701 - DNA, 20 bp, Artificial Sequence
  chemically synthesized
tgtaaaagacttagcaattt

SEQ ID NO: 40702 - DNA, 20 bp, Artificial Sequence
  chemically synthesized
ctttccaaaagagcttatca

SEQ ID NO: 40703 - DNA, 20 bp, Artificial Sequence
  chemically synthesized
agagaagtttgttctagcct

SEQ ID NO: 40704 - DNA, 20 bp, Artificial Sequence
  chemically synthesized
tagcctttgggtgtagcctg

SEQ ID NO: 40705 - DNA, 20 bp, Artificial Sequence
  chemically synthesized
ctagtttccatgggctgaaa

SEQ ID NO: 40706 - DNA, 20 bp, Artificial Sequence
  chemically synthesized
gtattttctttgatattttc

SEQ ID NO: 40707 - DNA, 20 bp, Artificial Sequence
  chemically synthesized
tgtgcttcaagatggaactc

SEQ ID NO: 40708 - DNA, 20 bp, Artificial Sequence
  chemically synthesized
ggcaactgctcaactacctg

SEQ ID NO: 40709 - DNA, 20 bp, Artificial Sequence
  chemically synthesized
gcccaagctagcatggaccc

SEQ ID NO: 40710 - DNA, 20 bp, Artificial Sequence
  chemically synthesized
ccagacttctctcttcttaa

SEQ ID NO: 40711 - DNA, 20 bp, Artificial Sequence
  chemically synthesized
aacctgctcttcagttacat

SEQ ID NO: 40712 - DNA, 20 bp, Artificial Sequence
  chemically synthesized
tttctttatttccttgattt

SEQ ID NO: 40713 - DNA, 20 bp, Artificial Sequence
  chemically synthesized
gatttctttgtttataaaat

SEQ ID NO: 40714 - DNA, 20 bp, Artificial Sequence
  chemically synthesized
taacccactcaacaaatacc

SEQ ID NO: 40715 - DNA, 20 bp, Artificial Sequence
  chemically synthesized
acaaataccctgagtatttg

SEQ ID NO: 40716 - DNA, 20 bp, Artificial Sequence
  chemically synthesized
atgcgtatatcatctggcaa

SEQ ID NO: 40717 - DNA, 20 bp, Artificial Sequence
  chemically synthesized
tggatgtgtataatttctcc

SEQ ID NO: 40718 - DNA, 20 bp, Artificial Sequence
  chemically synthesized
ccataacaaagagagaaatg

SEQ ID NO: 40719 - DNA, 20 bp, Artificial Sequence
  chemically synthesized
caaggaaccaaacatattca

SEQ ID NO: 40720 - DNA, 20 bp, Artificial Sequence
  chemically synthesized
gaaattaaacttattttttt

SEQ ID NO: 40721 - DNA, 20 bp, Artificial Sequence
  chemically synthesized
catatacaagattttgaact

SEQ ID NO: 40722 - DNA, 20 bp, Artificial Sequence
  chemically synthesized
gattttgaactgggaatttc

SEQ ID NO: 40723 - DNA, 20 bp, Artificial Sequence
  chemically synthesized
tttcatgaatcaaaaattaa

SEQ ID NO: 40724 - DNA, 20 bp, Artificial Sequence
  chemically synthesized
aggacattgttgacttacat

SEQ ID NO: 40725 - DNA, 20 bp, Artificial Sequence
  chemically synthesized
gacccatgccactggctcag

SEQ ID NO: 40726 - DNA, 20 bp, Artificial Sequence
  chemically synthesized
agcagggttcaaacattacc

SEQ ID NO: 40727 - DNA, 20 bp, Artificial Sequence
  chemically synthesized
ttcaaacattaccttgaata

SEQ ID NO: 40728 - DNA, 20 bp, Artificial Sequence
  chemically synthesized
tagagtcttataaaatattt

SEQ ID NO: 40729 - DNA, 20 bp, Artificial Sequence
  chemically synthesized
cttctttcattctctttctt

SEQ ID NO: 40730 - DNA, 20 bp, Artificial Sequence
  chemically synthesized
ccgaggttgtgtcgctaccc

SEQ ID NO: 40731 - DNA, 20 bp, Artificial Sequence
  chemically synthesized
agatatcaatccttccagga

SEQ ID NO: 40732 - DNA, 20 bp, Artificial Sequence
  chemically synthesized
attttgggaggccacggcag

SEQ ID NO: 40733 - DNA, 20 bp, Artificial Sequence
  chemically synthesized
cagatggatcacctgaggcc

SEQ ID NO: 40734 - DNA, 20 bp, Artificial Sequence
  chemically synthesized
acaaaaaatacaaaaattag

SEQ ID NO: 40735 - DNA, 20 bp, Artificial Sequence
  chemically synthesized
tactaagtaggctgaggcac

SEQ ID NO: 40736 - DNA, 20 bp, Artificial Sequence
  chemically synthesized
gatggaggttgcagtgagcc

SEQ ID NO: 40737 - DNA, 20 bp, Artificial Sequence
  chemically synthesized
atgtgccactgcactccagc

SEQ ID NO: 40738 - DNA, 20 bp, Artificial Sequence
  chemically synthesized
tccagcctgggtgacagagc

SEQ ID NO: 40739 - DNA, 20 bp, Artificial Sequence
  chemically synthesized
atatttttaaaaataaaaca

SEQ ID NO: 40740 - DNA, 20 bp, Artificial Sequence
  chemically synthesized
tttaaaaataaaacataggg

SEQ ID NO: 40741 - DNA, 20 bp, Artificial Sequence
  chemically synthesized
actttgggaggccaagacag

SEQ ID NO: 40742 - DNA, 20 bp, Artificial Sequence
  chemically synthesized
gacaggtggatcacaaggtc

SEQ ID NO: 40743 - DNA, 20 bp, Artificial Sequence
  chemically synthesized
atcccagctactagggaggc

SEQ ID NO: 40744 - DNA, 20 bp, Artificial Sequence
  chemically synthesized
tcacgtcagtgcacttcaac

SEQ ID NO: 40745 - DNA, 20 bp, Artificial Sequence
  chemically synthesized
cagtgcacttcaaccggggt

SEQ ID NO: 40746 - DNA, 20 bp, Artificial Sequence
  chemically synthesized
tagtatcaatctttccgcaa

SEQ ID NO: 40747 - DNA, 20 bp, Artificial Sequence
  chemically synthesized
tcgttctcatgaagtaaagc

SEQ ID NO: 40748 - DNA, 20 bp, Artificial Sequence
  chemically synthesized
atgaagtaaagcaagagtgg

SEQ ID NO: 40749 - DNA, 20 bp, Artificial Sequence
  chemically synthesized
gagtggtagaattaagtgga

SEQ ID NO: 40750 - DNA, 20 bp, Artificial Sequence
  chemically synthesized
tggccaccgggacaccccag

SEQ ID NO: 40751 - DNA, 20 bp, Artificial Sequence
  chemically synthesized
caccgggacaccccaggagg

SEQ ID NO: 40752 - DNA, 20 bp, Artificial Sequence
  chemically synthesized
tcaagccccaagaagtcccc

SEQ ID NO: 40753 - DNA, 20 bp, Artificial Sequence
  chemically synthesized
aagaagtccccttggatgat

SEQ ID NO: 40754 - DNA, 20 bp, Artificial Sequence
  chemically synthesized
atacatttgggacagatcta

SEQ ID NO: 40755 - DNA, 20 bp, Artificial Sequence
  chemically synthesized
tttctgagcaacacttagac

SEQ ID NO: 40756 - DNA, 20 bp, Artificial Sequence
  chemically synthesized
ttccattgattaaatcctac

SEQ ID NO: 40757 - DNA, 20 bp, Artificial Sequence
  chemically synthesized
aatgcccagcacagagctca

SEQ ID NO: 40758 - DNA, 20 bp, Artificial Sequence
  chemically synthesized
gccagactctctgaaccctg

SEQ ID NO: 40759 - DNA, 20 bp, Artificial Sequence
  chemically synthesized
ggagagtgtaaacgtcatat

SEQ ID NO: 40760 - DNA, 20 bp, Artificial Sequence
  chemically synthesized
agagtctatgttccaaaaac

SEQ ID NO: 40761 - DNA, 20 bp, Artificial Sequence
  chemically synthesized
tctttgcttttaaaaccata

SEQ ID NO: 40762 - DNA, 20 bp, Artificial Sequence
  chemically synthesized
taaagaataatgtttaaatg

SEQ ID NO: 40763 - DNA, 20 bp, Artificial Sequence
  chemically synthesized
ttttcactcaacattacata

SEQ ID NO: 40764 - DNA, 20 bp, Artificial Sequence
  chemically synthesized
atgagcatgaggtttccttt

SEQ ID NO: 40765 - DNA, 20 bp, Artificial Sequence
  chemically synthesized
gatgatggttgcacaccact

SEQ ID NO: 40766 - DNA, 20 bp, Artificial Sequence
  chemically synthesized
tacattttattgcaataaaa

SEQ ID NO: 40767 - DNA, 20 bp, Artificial Sequence
  chemically synthesized
ttgtctagttcaacctgagc

SEQ ID NO: 40768 - DNA, 20 bp, Artificial Sequence
  chemically synthesized
tcaacctgagcctgggtctg

SEQ ID NO: 40769 - DNA, 20 bp, Artificial Sequence
  chemically synthesized
aatcacttcaccacacttgt

SEQ ID NO: 40770 - DNA, 20 bp, Artificial Sequence
  chemically synthesized
atacttctttgacaatttgg

SEQ ID NO: 40771 - DNA, 20 bp, Artificial Sequence
  chemically synthesized
ttttccagatggacacaccc

SEQ ID NO: 40772 - DNA, 20 bp, Artificial Sequence
  chemically synthesized
tttgcaagcccagctttcat

SEQ ID NO: 40773 - DNA, 20 bp, Artificial Sequence
  chemically synthesized
ttcagaaacctgactgcatc

SEQ ID NO: 40774 - DNA, 20 bp, Artificial Sequence
  chemically synthesized
tgactaccaagcatcgggca

SEQ ID NO: 40775 - DNA, 20 bp, Artificial Sequence
  chemically synthesized
tgtgagggagcaccgttctc

SEQ ID NO: 40776 - DNA, 20 bp, Artificial Sequence
  chemically synthesized
caggaaagttgatgtggtct

SEQ ID NO: 40777 - DNA, 20 bp, Artificial Sequence
  chemically synthesized
aggtaggccacaggtgacaa

SEQ ID NO: 40778 - DNA, 20 bp, Artificial Sequence
  chemically synthesized
gggccttggggagagggcag

SEQ ID NO: 40779 - DNA, 20 bp, Artificial Sequence
  chemically synthesized
cagcagggtaagtccagcgg

SEQ ID NO: 40780 - DNA, 20 bp, Artificial Sequence
  chemically synthesized
gcaggatcagtccattgatt

SEQ ID NO: 40781 - DNA, 20 bp, Artificial Sequence
  chemically synthesized
tagaaaattgatgaacaggc

SEQ ID NO: 40782 - DNA, 20 bp, Artificial Sequence
  chemically synthesized
catggtctagttagtgttct

SEQ ID NO: 40783 - DNA, 20 bp, Artificial Sequence
  chemically synthesized
ggcgaggcagaagcctagtg

SEQ ID NO: 40784 - DNA, 20 bp, Artificial Sequence
  chemically synthesized
gggatggtggttagaaatgt

SEQ ID NO: 40785 - DNA, 20 bp, Artificial Sequence
  chemically synthesized
ggtaataattgtgatggtgg

SEQ ID NO: 40786 - DNA, 20 bp, Artificial Sequence
  chemically synthesized
gaatgatgatgatggtggtg

SEQ ID NO: 40787 - DNA, 20 bp, Artificial Sequence
  chemically synthesized
gatgataatggtgatggtgg

SEQ ID NO: 40788 - DNA, 20 bp, Artificial Sequence
  chemically synthesized
atggtggtggtgatgatgtt

SEQ ID NO: 40789 - DNA, 20 bp, Artificial Sequence
  chemically synthesized
ggtaatgataatggtgatgg

SEQ ID NO: 40790 - DNA, 20 bp, Artificial Sequence
  chemically synthesized
tggaatgatggtgatggtgg

SEQ ID NO: 40791 - DNA, 20 bp, Artificial Sequence
  chemically synthesized
gtggaatgatgatggtggtg

SEQ ID NO: 40792 - DNA, 20 bp, Artificial Sequence
  chemically synthesized
gtgatgatggtgatgatgtt

SEQ ID NO: 40793 - DNA, 20 bp, Artificial Sequence
  chemically synthesized
gtttccaggtgttccctgac

SEQ ID NO: 40794 - DNA, 20 bp, Artificial Sequence
  chemically synthesized
tccctgacttggatcaaatg

SEQ ID NO: 40795 - DNA, 20 bp, Artificial Sequence
  chemically synthesized
tttggaggtgttgaggccaa

SEQ ID NO: 40796 - DNA, 20 bp, Artificial Sequence
  chemically synthesized
tgacatctctatgtcggcca

SEQ ID NO: 40797 - DNA, 20 bp, Artificial Sequence
  chemically synthesized
cggtaggttttcaccattat

SEQ ID NO: 40798 - DNA, 20 bp, Artificial Sequence
  chemically synthesized
gattgagctgagctggcctc

SEQ ID NO: 40799 - DNA, 20 bp, Artificial Sequence
  chemically synthesized
aggctctgggggaagaaaga

SEQ ID NO: 40800 - DNA, 20 bp, Artificial Sequence
  chemically synthesized
ctgtgccatgctcgcaaagc

SEQ ID NO: 40801 - DNA, 20 bp, Artificial Sequence
  chemically synthesized
gggcttgcaaaattagaaaa

SEQ ID NO: 40802 - DNA, 20 bp, Artificial Sequence
  chemically synthesized
gtgagaacactgaaacatcc

SEQ ID NO: 40803 - DNA, 20 bp, Artificial Sequence
  chemically synthesized
caattttgcaaccgttctat

SEQ ID NO: 40804 - DNA, 20 bp, Artificial Sequence
  chemically synthesized
aataaagcagtttttcacaa

SEQ ID NO: 40805 - DNA, 20 bp, Artificial Sequence
  chemically synthesized
aaaagaataaacacaaccag

SEQ ID NO: 40806 - DNA, 20 bp, Artificial Sequence
  chemically synthesized
aaagaagtataaattagaaa

SEQ ID NO: 40807 - DNA, 20 bp, Artificial Sequence
  chemically synthesized
cttaggctcagaaaatatta

SEQ ID NO: 40808 - DNA, 20 bp, Artificial Sequence
  chemically synthesized
ctcagaaaatattaaggaat

SEQ ID NO: 40809 - DNA, 20 bp, Artificial Sequence
  chemically synthesized
actttatgaacaaagatgtg

SEQ ID NO: 40810 - DNA, 20 bp, Artificial Sequence
  chemically synthesized
agtttccttaactgtagagc

SEQ ID NO: 40811 - DNA, 20 bp, Artificial Sequence
  chemically synthesized
ctgtttcataggactgttgt

SEQ ID NO: 40812 - DNA, 20 bp, Artificial Sequence
  chemically synthesized
attataagcttgtgcctgga

SEQ ID NO: 40813 - DNA, 20 bp, Artificial Sequence
  chemically synthesized
caataaaatgtacacagcgt

SEQ ID NO: 40814 - DNA, 20 bp, Artificial Sequence
  chemically synthesized
tactattttaaccatttttg

SEQ ID NO: 40815 - DNA, 20 bp, Artificial Sequence
  chemically synthesized
tgcaaccatcatcatatttc

SEQ ID NO: 40816 - DNA, 20 bp, Artificial Sequence
  chemically synthesized
acaaaactcattatgtaatg

SEQ ID NO: 40817 - DNA, 20 bp, Artificial Sequence
  chemically synthesized
gtaatgttgagtgaaaaaat

SEQ ID NO: 40818 - DNA, 20 bp, Artificial Sequence
  chemically synthesized
tatatgacgtttacactctc

SEQ ID NO: 40819 - DNA, 20 bp, Artificial Sequence
  chemically synthesized
tttacactctccagggttca

SEQ ID NO: 40820 - DNA, 20 bp, Artificial Sequence
  chemically synthesized
tcaccactgctctgttcttc

SEQ ID NO: 40821 - DNA, 20 bp, Artificial Sequence
  chemically synthesized
aagcccagctccctgtgatt

SEQ ID NO: 40822 - DNA, 20 bp, Artificial Sequence
  chemically synthesized
gaatgaagtgtgcaatcgct

SEQ ID NO: 40823 - DNA, 20 bp, Artificial Sequence
  chemically synthesized
tgtgcaatcgctatgagttt

SEQ ID NO: 40824 - DNA, 20 bp, Artificial Sequence
  chemically synthesized
cgctatgagtttctgaatgg

SEQ ID NO: 40825 - DNA, 20 bp, Artificial Sequence
  chemically synthesized
tcagtctcagtcccttagac

SEQ ID NO: 40826 - DNA, 20 bp, Artificial Sequence
  chemically synthesized
tagacttgagtcccaaagta

SEQ ID NO: 40827 - DNA, 20 bp, Artificial Sequence
  chemically synthesized
cccaaagtagcgaattcaag

SEQ ID NO: 40828 - DNA, 20 bp, Artificial Sequence
  chemically synthesized
ccaaggggacttcttggggc

SEQ ID NO: 40829 - DNA, 20 bp, Artificial Sequence
  chemically synthesized
cctcagaccactcaccctcc

SEQ ID NO: 40830 - DNA, 20 bp, Artificial Sequence
  chemically synthesized
ttctggtagggaaggaggta

SEQ ID NO: 40831 - DNA, 20 bp, Artificial Sequence
  chemically synthesized
gctcagatattgctgatgat

SEQ ID NO: 40832 - DNA, 20 bp, Artificial Sequence
  chemically synthesized
aattgatttacaactggggc

SEQ ID NO: 40833 - DNA, 20 bp, Artificial Sequence
  chemically synthesized
cgaaaatgtaagattgcacc

SEQ ID NO: 40834 - DNA, 20 bp, Artificial Sequence
  chemically synthesized
ctcactgcaacttccacctc

SEQ ID NO: 40835 - DNA, 20 bp, Artificial Sequence
  chemically synthesized
cttccacctcctgggttcaa

SEQ ID NO: 40836 - DNA, 20 bp, Artificial Sequence
  chemically synthesized
actccagcctccctagtagc

SEQ ID NO: 40837 - DNA, 20 bp, Artificial Sequence
  chemically synthesized
ttttgtatttttagtagaga

SEQ ID NO: 40838 - DNA, 20 bp, Artificial Sequence
  chemically synthesized
gtcttggcctcccaaagtgc

SEQ ID NO: 40839 - DNA, 20 bp, Artificial Sequence
  chemically synthesized
ctcccaaagtgctgggatta

SEQ ID NO: 40840 - DNA, 20 bp, Artificial Sequence
  chemically synthesized
tttatttaagccacaactac

SEQ ID NO: 40841 - DNA, 20 bp, Artificial Sequence
  chemically synthesized
gccacaactactagaatagg

SEQ ID NO: 40842 - DNA, 20 bp, Artificial Sequence
  chemically synthesized
tcttgctctgtcacccaggc

SEQ ID NO: 40843 - DNA, 20 bp, Artificial Sequence
  chemically synthesized
gcctcagcctacttagtagc

SEQ ID NO: 40844 - DNA, 20 bp, Artificial Sequence
  chemically synthesized
ttttgtattttttgtagaga

SEQ ID NO: 40845 - DNA, 20 bp, Artificial Sequence
  chemically synthesized
gccgtggcctcccaaaatgc

SEQ ID NO: 40846 - DNA, 20 bp, Artificial Sequence
  chemically synthesized
gagccaccaccccctcctgg

SEQ ID NO: 40847 - DNA, 20 bp, Artificial Sequence
  chemically synthesized
tttataattacagaaaacat

SEQ ID NO: 40848 - DNA, 20 bp, Artificial Sequence
  chemically synthesized
agaaaacatgtgagttcact

SEQ ID NO: 40849 - DNA, 20 bp, Artificial Sequence
  chemically synthesized
catttcggcacagtttggta

SEQ ID NO: 40850 - DNA, 20 bp, Artificial Sequence
  chemically synthesized
gctcgtaaactaagacctga

SEQ ID NO: 40851 - DNA, 20 bp, Artificial Sequence
  chemically synthesized
tgtgtctatcagctgcaccc

SEQ ID NO: 40852 - DNA, 20 bp, Artificial Sequence
  chemically synthesized
tggaaagcttgagggaggct

SEQ ID NO: 40853 - DNA, 20 bp, Artificial Sequence
  chemically synthesized
tggatgtgcagcacttggca

SEQ ID NO: 40854 - DNA, 20 bp, Artificial Sequence
  chemically synthesized
tttattttatccaaaagaaa

SEQ ID NO: 40855 - DNA, 20 bp, Artificial Sequence
  chemically synthesized
atcaggaaagatgaaggtct

SEQ ID NO: 40856 - DNA, 20 bp, Artificial Sequence
  chemically synthesized
gaaggtctaggggtgaggga

SEQ ID NO: 40857 - DNA, 20 bp, Artificial Sequence
  chemically synthesized
aaccctgctgagccagtggc

SEQ ID NO: 40858 - DNA, 20 bp, Artificial Sequence
  chemically synthesized
ccagtggcatgggtctctga

SEQ ID NO: 40859 - DNA, 20 bp, Artificial Sequence
  chemically synthesized
ttaatttgactatctggttt

SEQ ID NO: 40860 - DNA, 20 bp, Artificial Sequence
  chemically synthesized
catgtaagtcaacaatgtcc

SEQ ID NO: 40861 - DNA, 20 bp, Artificial Sequence
  chemically synthesized
acatagtttttttaaattat

SEQ ID NO: 40862 - DNA, 20 bp, Artificial Sequence
  chemically synthesized
cgtgaagactgtcacggtgc

SEQ ID NO: 40863 - DNA, 20 bp, Artificial Sequence
  chemically synthesized
aagactgtcacggtgctgga

SEQ ID NO: 40864 - DNA, 20 bp, Artificial Sequence
  chemically synthesized
ggttgatttttctaatctaa

SEQ ID NO: 40865 - DNA, 20 bp, Artificial Sequence
  chemically synthesized
ccattgtagctaactatgca

SEQ ID NO: 40866 - DNA, 20 bp, Artificial Sequence
  chemically synthesized
tgaaacaatgaaataactct

SEQ ID NO: 40867 - DNA, 20 bp, Artificial Sequence
  chemically synthesized
ttggttccttgacctgttca

SEQ ID NO: 40868 - DNA, 20 bp, Artificial Sequence
  chemically synthesized
atttctctctttgttatggc

SEQ ID NO: 40869 - DNA, 20 bp, Artificial Sequence
  chemically synthesized
ataatgattcaacaaatact

SEQ ID NO: 40870 - DNA, 20 bp, Artificial Sequence
  chemically synthesized
acaaatactcagggtatttg

SEQ ID NO: 40871 - DNA, 20 bp, Artificial Sequence
  chemically synthesized
atactcagggtatttgttga

SEQ ID NO: 40872 - DNA, 20 bp, Artificial Sequence
  chemically synthesized
catacacaccgtgtgtgatt

SEQ ID NO: 40873 - DNA, 20 bp, Artificial Sequence
  chemically synthesized
tatttagctcatggtatagg

SEQ ID NO: 40874 - DNA, 20 bp, Artificial Sequence
  chemically synthesized
aatcaaggaaataaagaaac

SEQ ID NO: 40875 - DNA, 20 bp, Artificial Sequence
  chemically synthesized
ggttaattgtttgccacttg

SEQ ID NO: 40876 - DNA, 20 bp, Artificial Sequence
  chemically synthesized
aggcaacagaggaggcgagc

SEQ ID NO: 40877 - DNA, 20 bp, Artificial Sequence
  chemically synthesized
gaggaggcgagcaaggattc

SEQ ID NO: 40878 - DNA, 20 bp, Artificial Sequence
  chemically synthesized
cctgctggtgcctttgtgag

SEQ ID NO: 40879 - DNA, 20 bp, Artificial Sequence
  chemically synthesized
tcccttgaggcaaatctctg

SEQ ID NO: 40880 - DNA, 20 bp, Artificial Sequence
  chemically synthesized
gaggcaaatctctggagggt

SEQ ID NO: 40881 - DNA, 20 bp, Artificial Sequence
  chemically synthesized
tataaatcacctgtgaactc

SEQ ID NO: 40882 - DNA, 20 bp, Artificial Sequence
  chemically synthesized
agatgaacttgccctgcagg

SEQ ID NO: 40883 - DNA, 20 bp, Artificial Sequence
  chemically synthesized
gactttaaagtcaaacacat

SEQ ID NO: 40884 - DNA, 20 bp, Artificial Sequence
  chemically synthesized
gagcaggagaagattaagca

SEQ ID NO: 40885 - DNA, 20 bp, Artificial Sequence
  chemically synthesized
tgtctatgtctgtgtgtgta

SEQ ID NO: 40886 - DNA, 20 bp, Artificial Sequence
  chemically synthesized
ctgtgtgtgtagggagtgca

SEQ ID NO: 40887 - DNA, 20 bp, Artificial Sequence
  chemically synthesized
gtgtagggagtgcaggggat

SEQ ID NO: 40888 - DNA, 20 bp, Artificial Sequence
  chemically synthesized
ctatttcagcccatggaaac

SEQ ID NO: 40889 - DNA, 20 bp, Artificial Sequence
  chemically synthesized
tagaacaaacttctctgcca

SEQ ID NO: 40890 - DNA, 20 bp, Artificial Sequence
  chemically synthesized
gttatctttccaatgtgtgc

SEQ ID NO: 40891 - DNA, 20 bp, Artificial Sequence
  chemically synthesized
ttgccatatgagccctggag

SEQ ID NO: 40892 - DNA, 20 bp, Artificial Sequence
  chemically synthesized
gaggtgaatcagagaaacaa

SEQ ID NO: 40893 - DNA, 20 bp, Artificial Sequence
  chemically synthesized
aagaaaaattgattctgttt

SEQ ID NO: 40894 - DNA, 20 bp, Artificial Sequence
  chemically synthesized
ctagcaacatgagctgggga

SEQ ID NO: 40895 - DNA, 20 bp, Artificial Sequence
  chemically synthesized
taaatggaagtttcctcttt

SEQ ID NO: 40896 - DNA, 20 bp, Artificial Sequence
  chemically synthesized
tgaagtcacactgtgagcta

SEQ ID NO: 40897 - DNA, 20 bp, Artificial Sequence
  chemically synthesized
gcacaactcttcctggaaaa

SEQ ID NO: 40898 - DNA, 20 bp, Artificial Sequence
  chemically synthesized
agttcaaatgagaaacagtg

SEQ ID NO: 40899 - DNA, 20 bp, Artificial Sequence
  chemically synthesized
aaacagtgcggggtgaagac

SEQ ID NO: 40900 - DNA, 20 bp, Artificial Sequence
  chemically synthesized
tatctatcaagtgcttttta

SEQ ID NO: 40901 - DNA, 20 bp, Artificial Sequence
  chemically synthesized
gctttttagtggattaggtt

SEQ ID NO: 40902 - DNA, 20 bp, Artificial Sequence
  chemically synthesized
aggtcaggacaggcctttct

SEQ ID NO: 40903 - DNA, 20 bp, Artificial Sequence
  chemically synthesized
ggacaggcctttctgagaat

SEQ ID NO: 40904 - DNA, 20 bp, Artificial Sequence
  chemically synthesized
tctgttcatctgcctttcta

SEQ ID NO: 40905 - DNA, 20 bp, Artificial Sequence
  chemically synthesized
tcctaaggagcctcaggaca

SEQ ID NO: 40906 - DNA, 20 bp, Artificial Sequence
  chemically synthesized
tttacaatttcctctgaaat

SEQ ID NO: 40907 - DNA, 20 bp, Artificial Sequence
  chemically synthesized
ctatcaacaccttggaaaaa

SEQ ID NO: 40908 - DNA, 20 bp, Artificial Sequence
  chemically synthesized
tccaaggttcatttctacac

SEQ ID NO: 40909 - DNA, 20 bp, Artificial Sequence
  chemically synthesized
caggaggtggaagcccctga

SEQ ID NO: 40910 - DNA, 20 bp, Artificial Sequence
  chemically synthesized
cctgagagaatggaggtctg

SEQ ID NO: 40911 - DNA, 20 bp, Artificial Sequence
  chemically synthesized
ccaagtcctgcatgctagac

SEQ ID NO: 40912 - DNA, 20 bp, Artificial Sequence
  chemically synthesized
ctagacatgagtggaggagg

SEQ ID NO: 40913 - DNA, 20 bp, Artificial Sequence
  chemically synthesized
gggggaatacctaggtagaa

SEQ ID NO: 40914 - DNA, 20 bp, Artificial Sequence
  chemically synthesized
tcactgtgcagttaactttt

SEQ ID NO: 40915 - DNA, 20 bp, Artificial Sequence
  chemically synthesized
cggttgcagttagtatacat

SEQ ID NO: 40916 - DNA, 20 bp, Artificial Sequence
  chemically synthesized
tgagtgctatacaaccttct

SEQ ID NO: 40917 - DNA, 20 bp, Artificial Sequence
  chemically synthesized
gaagcaatgcagccattacg

SEQ ID NO: 40918 - DNA, 20 bp, Artificial Sequence
  chemically synthesized
taaaaagtatttctttaggt

SEQ ID NO: 40919 - DNA, 20 bp, Artificial Sequence
  chemically synthesized
ctacgcattgacttatcttc

SEQ ID NO: 40920 - DNA, 20 bp, Artificial Sequence
  chemically synthesized
cctccagcacacagcaggga

SEQ ID NO: 40921 - DNA, 20 bp, Artificial Sequence
  chemically synthesized
ggctgcactctgtgtttttg

SEQ ID NO: 40922 - DNA, 20 bp, Artificial Sequence
  chemically synthesized
ctagggaaggaaaaaagatc

SEQ ID NO: 40923 - DNA, 20 bp, Artificial Sequence
  chemically synthesized
ctgcccccaagctgtagagc

SEQ ID NO: 40924 - DNA, 20 bp, Artificial Sequence
  chemically synthesized
gcctacatctttctcctgtg

SEQ ID NO: 40925 - DNA, 20 bp, Artificial Sequence
  chemically synthesized
ttatgggaccttgtaatctt

SEQ ID NO: 40926 - DNA, 20 bp, Artificial Sequence
  chemically synthesized
cttaataagctcccctttgt

SEQ ID NO: 40927 - DNA, 20 bp, Artificial Sequence
  chemically synthesized
cagaagtggttcttgaggaa

SEQ ID NO: 40928 - DNA, 20 bp, Artificial Sequence
  chemically synthesized
ttcttgaggaacagaatatt

SEQ ID NO: 40929 - DNA, 20 bp, Artificial Sequence
  chemically synthesized
gaggaacagaatattaagga

SEQ ID NO: 40930 - DNA, 20 bp, Artificial Sequence
  chemically synthesized
gaacactgatagtacttggc

SEQ ID NO: 40931 - DNA, 20 bp, Artificial Sequence
  chemically synthesized
tacttggcctgaattgttta

SEQ ID NO: 40932 - DNA, 20 bp, Artificial Sequence
  chemically synthesized
ttcatcacttatgagaggca

SEQ ID NO: 40933 - DNA, 20 bp, Artificial Sequence
  chemically synthesized
gaaagaaaatgatgatctca

SEQ ID NO: 40934 - DNA, 20 bp, Artificial Sequence
  chemically synthesized
acaaatctgctaagattgcc

SEQ ID NO: 40935 - DNA, 20 bp, Artificial Sequence
  chemically synthesized
ctgctaagattgccctgaat

SEQ ID NO: 40936 - DNA, 20 bp, Artificial Sequence
  chemically synthesized
agttttaactcctgtagaga

SEQ ID NO: 40937 - DNA, 20 bp, Artificial Sequence
  chemically synthesized
cagagacaagctgttatcat

SEQ ID NO: 40938 - DNA, 20 bp, Artificial Sequence
  chemically synthesized
aaaaatgggaccctggaact

SEQ ID NO: 40939 - DNA, 20 bp, Artificial Sequence
  chemically synthesized
gggaccctggaacttggagt

SEQ ID NO: 40940 - DNA, 20 bp, Artificial Sequence
  chemically synthesized
ccctgatgaagctgaggaca

SEQ ID NO: 40941 - DNA, 20 bp, Artificial Sequence
  chemically synthesized
tagcctttccacctttgtct

SEQ ID NO: 40942 - DNA, 20 bp, Artificial Sequence
  chemically synthesized
aagaggcacccctaatgccc

SEQ ID NO: 40943 - DNA, 20 bp, Artificial Sequence
  chemically synthesized
cgggccccagaggtgaggtt

SEQ ID NO: 40944 - DNA, 20 bp, Artificial Sequence
  chemically synthesized
gaaatctggagaacaggcat

SEQ ID NO: 40945 - DNA, 20 bp, Artificial Sequence
  chemically synthesized
tctggagaacaggcatggga

SEQ ID NO: 40946 - DNA, 20 bp, Artificial Sequence
  chemically synthesized
caggcatgggaatggatatt

SEQ ID NO: 40947 - DNA, 20 bp, Artificial Sequence
  chemically synthesized
gggaatggatattaagggta

SEQ ID NO: 40948 - DNA, 20 bp, Artificial Sequence
  chemically synthesized
ggataatggtggaagggaca

SEQ ID NO: 40949 - DNA, 20 bp, Artificial Sequence
  chemically synthesized
atggtggaagggacatagag

SEQ ID NO: 40950 - DNA, 20 bp, Artificial Sequence
  chemically synthesized
ggacatagagttggatcaag

SEQ ID NO: 40951 - DNA, 20 bp, Artificial Sequence
  chemically synthesized
ttggtttggccctactaagt

SEQ ID NO: 40952 - DNA, 20 bp, Artificial Sequence
  chemically synthesized
tttgcttggttagctgaaat

SEQ ID NO: 40953 - DNA, 20 bp, Artificial Sequence
  chemically synthesized
atccaaaggcttagggagat

SEQ ID NO: 40954 - DNA, 20 bp, Artificial Sequence
  chemically synthesized
gcttagggagattaggatgg

SEQ ID NO: 40955 - DNA, 20 bp, Artificial Sequence
  chemically synthesized
agggagattaggatggtgga

SEQ ID NO: 40956 - DNA, 20 bp, Artificial Sequence
  chemically synthesized
gacctactcatcccagctgg

SEQ ID NO: 40957 - DNA, 20 bp, Artificial Sequence
  chemically synthesized
ctacaaaatttaaatacaat

SEQ ID NO: 40958 - DNA, 20 bp, Artificial Sequence
  chemically synthesized
tttaaatacaatgggaataa

SEQ ID NO: 40959 - DNA, 20 bp, Artificial Sequence
  chemically synthesized
agcagaggcaaagcagccat

SEQ ID NO: 40960 - DNA, 20 bp, Artificial Sequence
  chemically synthesized
ataaacaaaaaactgccagg

SEQ ID NO: 40961 - DNA, 20 bp, Artificial Sequence
  chemically synthesized
agaatggactaaagactaat

SEQ ID NO: 40962 - DNA, 20 bp, Artificial Sequence
  chemically synthesized
taatctgaattataaaaaca

SEQ ID NO: 40963 - DNA, 20 bp, Artificial Sequence
  chemically synthesized
tgttacagttccagaaccca

SEQ ID NO: 40964 - DNA, 20 bp, Artificial Sequence
  chemically synthesized
cccactgaatgaaggggagg

SEQ ID NO: 40965 - DNA, 20 bp, Artificial Sequence
  chemically synthesized
ggagacctctggccttttac

SEQ ID NO: 40966 - DNA, 20 bp, Artificial Sequence
  chemically synthesized
ctctgagctgacgttgattc

SEQ ID NO: 40967 - DNA, 20 bp, Artificial Sequence
  chemically synthesized
tatggaggttaggtaattaa

SEQ ID NO: 40968 - DNA, 20 bp, Artificial Sequence
  chemically synthesized
tctgacttacagtggttcca

SEQ ID NO: 40969 - DNA, 20 bp, Artificial Sequence
  chemically synthesized
cacattggctccctgactgg

SEQ ID NO: 40970 - DNA, 20 bp, Artificial Sequence
  chemically synthesized
atcaaggacttgaaagacgc

SEQ ID NO: 40971 - DNA, 20 bp, Artificial Sequence
  chemically synthesized
ttgacctgtgcagaggacag

SEQ ID NO: 40972 - DNA, 20 bp, Artificial Sequence
  chemically synthesized
atggatcttggaaaatgatg

SEQ ID NO: 40973 - DNA, 20 bp, Artificial Sequence
  chemically synthesized
tacctttaccaccctacctc

SEQ ID NO: 40974 - DNA, 20 bp, Artificial Sequence
  chemically synthesized
cattcatgacattatgatga

SEQ ID NO: 40975 - DNA, 20 bp, Artificial Sequence
  chemically synthesized
ggtgagacatttgtatgcca

SEQ ID NO: 40976 - DNA, 20 bp, Artificial Sequence
  chemically synthesized
ttctacctcggtaaaatttc

SEQ ID NO: 40977 - DNA, 20 bp, Artificial Sequence
  chemically synthesized
acaatgcctggtgggcctat

SEQ ID NO: 40978 - DNA, 20 bp, Artificial Sequence
  chemically synthesized
ggaggcaacacattcctcgt

SEQ ID NO: 40979 - DNA, 20 bp, Artificial Sequence
  chemically synthesized
gtgttactctggcccattta

SEQ ID NO: 40980 - DNA, 20 bp, Artificial Sequence
  chemically synthesized
ttgaggtgtcagtggcagat

SEQ ID NO: 40981 - DNA, 20 bp, Artificial Sequence
  chemically synthesized
cctttggcaggcccccatag

SEQ ID NO: 40982 - DNA, 20 bp, Artificial Sequence
  chemically synthesized
tgaatcacagtggagacctc

SEQ ID NO: 40983 - DNA, 20 bp, Artificial Sequence
  chemically synthesized
tggtaactgaacgtttgact

SEQ ID NO: 40984 - DNA, 20 bp, Artificial Sequence
  chemically synthesized
ctgacccatctagccatgaa

SEQ ID NO: 40985 - DNA, 20 bp, Artificial Sequence
  chemically synthesized
cctgcaccaatggcctcatg

SEQ ID NO: 40986 - DNA, 20 bp, Artificial Sequence
  chemically synthesized
tatgtaataacttttggttt

SEQ ID NO: 40987 - DNA, 20 bp, Artificial Sequence
  chemically synthesized
tggtgcgtttctggttgtat

SEQ ID NO: 40988 - DNA, 20 bp, Artificial Sequence
  chemically synthesized
ttgaagattatgtatgattt

SEQ ID NO: 40989 - DNA, 20 bp, Artificial Sequence
  chemically synthesized
tatgatttcaggatgtgtgt

SEQ ID NO: 40990 - DNA, 20 bp, Artificial Sequence
  chemically synthesized
tgtatgggttcaagttgaca

SEQ ID NO: 40991 - DNA, 20 bp, Artificial Sequence
  chemically synthesized
ggttaatactgtcaacttga

SEQ ID NO: 40992 - DNA, 20 bp, Artificial Sequence
  chemically synthesized
ttaatctcggttatgtctgt

SEQ ID NO: 40993 - DNA, 20 bp, Artificial Sequence
  chemically synthesized
tggcaaaaggagattaacat

SEQ ID NO: 40994 - DNA, 20 bp, Artificial Sequence
  chemically synthesized
atacaactatcctcatacaa

SEQ ID NO: 40995 - DNA, 20 bp, Artificial Sequence
  chemically synthesized
gcacaagtgtacacatgcat

SEQ ID NO: 40996 - DNA, 20 bp, Artificial Sequence
  chemically synthesized
ccacttcatggctagatggg

SEQ ID NO: 40997 - DNA, 20 bp, Artificial Sequence
  chemically synthesized
ggtctcatgccactggaacc

SEQ ID NO: 40998 - DNA, 20 bp, Artificial Sequence
  chemically synthesized
accctagaaattttaccgag

SEQ ID NO: 40999 - DNA, 20 bp, Artificial Sequence
  chemically synthesized
tgggtcttatggacaggaat

SEQ ID NO: 41000 - DNA, 20 bp, Artificial Sequence
  chemically synthesized
cccactggaaccactgtaag

SEQ ID NO: 41001 - DNA, 20 bp, Artificial Sequence
  chemically synthesized
ggtctccttagggaaggatg

SEQ ID NO: 41002 - DNA, 20 bp, Artificial Sequence
  chemically synthesized
atggggtttcaccattttag

SEQ ID NO: 41003 - DNA, 20 bp, Artificial Sequence
  chemically synthesized
cccgagctgcaacattaaat

SEQ ID NO: 41004 - DNA, 20 bp, Artificial Sequence
  chemically synthesized
cagatttctgccaatataaa

SEQ ID NO: 41005 - DNA, 20 bp, Artificial Sequence
  chemically synthesized
gcattaggggtgcctcttga

SEQ ID NO: 41006 - DNA, 20 bp, Artificial Sequence
  chemically synthesized
cagaagtcccaaaaccaatg

SEQ ID NO: 41007 - DNA, 20 bp, Artificial Sequence
  chemically synthesized
agcaggaaggatccagcaca

SEQ ID NO: 41008 - DNA, 20 bp, Artificial Sequence
  chemically synthesized
gagtagcaggtgaaagctca

SEQ ID NO: 41009 - DNA, 20 bp, Artificial Sequence
  chemically synthesized
caggtgaaagctcacaagaa

SEQ ID NO: 41010 - DNA, 20 bp, Artificial Sequence
  chemically synthesized
tagtaggggcagggaccagt

SEQ ID NO: 41011 - DNA, 20 bp, Artificial Sequence
  chemically synthesized
ttgagataaacagtggtaag

SEQ ID NO: 41012 - DNA, 20 bp, Artificial Sequence
  chemically synthesized
cgtagaagtaattccaacct

SEQ ID NO: 41013 - DNA, 20 bp, Artificial Sequence
  chemically synthesized
acaatattgcaaatcattat

SEQ ID NO: 41014 - DNA, 20 bp, Artificial Sequence
  chemically synthesized
tctaaccataaaatcttaaa

SEQ ID NO: 41015 - DNA, 20 bp, Artificial Sequence
  chemically synthesized
gttgatctgctaatccctgt

SEQ ID NO: 41016 - DNA, 20 bp, Artificial Sequence
  chemically synthesized
gacacaccactattagttgg

SEQ ID NO: 41017 - DNA, 20 bp, Artificial Sequence
  chemically synthesized
atgccgatgacaagtatcca

SEQ ID NO: 41018 - DNA, 20 bp, Artificial Sequence
  chemically synthesized
agatgaacagattctcattc

SEQ ID NO: 41019 - DNA, 20 bp, Artificial Sequence
  chemically synthesized
tagatatatcaaaatatcat

SEQ ID NO: 41020 - DNA, 20 bp, Artificial Sequence
  chemically synthesized
ttgctaggaaatatcccaaa

SEQ ID NO: 41021 - DNA, 20 bp, Artificial Sequence
  chemically synthesized
aatagggtttatttgttggt

SEQ ID NO: 41022 - DNA, 20 bp, Artificial Sequence
  chemically synthesized
aatgtattttattaatggtg

SEQ ID NO: 41023 - DNA, 20 bp, Artificial Sequence
  chemically synthesized
tctcactgagcatggctgta

SEQ ID NO: 41024 - DNA, 20 bp, Artificial Sequence
  chemically synthesized
attggaaagataacacgtcc

SEQ ID NO: 41025 - DNA, 20 bp, Artificial Sequence
  chemically synthesized
gctttccaaaagagcttatc

SEQ ID NO: 41026 - DNA, 20 bp, Artificial Sequence
  chemically synthesized
cctagtttccatgggctgaa

SEQ ID NO: 41027 - DNA, 20 bp, Artificial Sequence
  chemically synthesized
ttactcaggccataacaaag

SEQ ID NO: 41028 - DNA, 20 bp, Artificial Sequence
  chemically synthesized
tgtaggcacactcttttaga

SEQ ID NO: 41029 - DNA, 20 bp, Artificial Sequence
  chemically synthesized
ggaaattaaacttatttttt

SEQ ID NO: 41030 - DNA, 20 bp, Artificial Sequence
  chemically synthesized
tgtatttttactacattgtg

SEQ ID NO: 41031 - DNA, 20 bp, Artificial Sequence
  chemically synthesized
aaactatgtcttacctgatt

SEQ ID NO: 41032 - DNA, 20 bp, Artificial Sequence
  chemically synthesized
ttgggactggccagcagtgc

SEQ ID NO: 41033 - DNA, 20 bp, Artificial Sequence
  chemically synthesized
ctactaagtaggctgaggca

SEQ ID NO: 41034 - DNA, 20 bp, Artificial Sequence
  chemically synthesized
agatggaggttgcagtgagc

SEQ ID NO: 41035 - DNA, 20 bp, Artificial Sequence
  chemically synthesized
ctccagcctgggtgacagag

SEQ ID NO: 41036 - DNA, 20 bp, Artificial Sequence
  chemically synthesized
cagagcaagaatgtctcagg

SEQ ID NO: 41037 - DNA, 20 bp, Artificial Sequence
  chemically synthesized
catgaagtaaagcaagagtg

SEQ ID NO: 41038 - DNA, 20 bp, Artificial Sequence
  chemically synthesized
accctctacctccttcccta

SEQ ID NO: 41039 - DNA, 20 bp, Artificial Sequence
  chemically synthesized
agtggatttgactcttccat

SEQ ID NO: 41040 - DNA, 20 bp, Artificial Sequence
  chemically synthesized
cacagggagctgggcttcct

SEQ ID NO: 41041 - DNA, 20 bp, Artificial Sequence
  chemically synthesized
tacctgtgtttaaaaagatg

SEQ ID NO: 41042 - DNA, 20 bp, Artificial Sequence
  chemically synthesized
ttctttgcttttaaaaccat

SEQ ID NO: 41043 - DNA, 20 bp, Artificial Sequence
  chemically synthesized
taatgtttaaatgtagagtc

SEQ ID NO: 41044 - DNA, 20 bp, Artificial Sequence
  chemically synthesized
gtacattttattgcaataaa

SEQ ID NO: 41045 - DNA, 20 bp, Artificial Sequence
  chemically synthesized
tatgacagtgtaaaatgtca

SEQ ID NO: 41046 - DNA, 20 bp, Artificial Sequence
  chemically synthesized
ttttgcaagcccagctttca

SEQ ID NO: 41047 - DNA, 20 bp, Artificial Sequence
  chemically synthesized
cttagatcattgactttggt

SEQ ID NO: 41048 - DNA, 20 bp, Artificial Sequence
  chemically synthesized
gtgtgagggagcaccgttct

SEQ ID NO: 41049 - DNA, 20 bp, Artificial Sequence
  chemically synthesized
cctgatgtcattattgacat

SEQ ID NO: 41050 - DNA, 20 bp, Artificial Sequence
  chemically synthesized
tcatggtctagttagtgttc

SEQ ID NO: 41051 - DNA, 20 bp, Artificial Sequence
  chemically synthesized
agcctagtgggggatggtgg

SEQ ID NO: 41052 - DNA, 20 bp, Artificial Sequence
  chemically synthesized
gtgtggatggttgtggggca

SEQ ID NO: 41053 - DNA, 20 bp, Artificial Sequence
  chemically synthesized
tgatgataatggtgatggtg

SEQ ID NO: 41054 - DNA, 20 bp, Artificial Sequence
  chemically synthesized
ggtctcacctgcaggtccac

SEQ ID NO: 41055 - DNA, 20 bp, Artificial Sequence
  chemically synthesized
ctctgcccgatgcttggtag

SEQ ID NO: 41056 - DNA, 20 bp, Artificial Sequence
  chemically synthesized
tgcagtcaaaggctctgggg

SEQ ID NO: 41057 - DNA, 20 bp, Artificial Sequence
  chemically synthesized
tgaaagctgggcttgcaaaa

SEQ ID NO: 41058 - DNA, 20 bp, Artificial Sequence
  chemically synthesized
ccgttctatttgaatttggc

SEQ ID NO: 41059 - DNA, 20 bp, Artificial Sequence
  chemically synthesized
aaataaagcagtttttcaca

SEQ ID NO: 41060 - DNA, 20 bp, Artificial Sequence
  chemically synthesized
caaaagaataaacacaacca

SEQ ID NO: 41061 - DNA, 20 bp, Artificial Sequence
  chemically synthesized
aattgtcaaagaagtataaa

SEQ ID NO: 41062 - DNA, 20 bp, Artificial Sequence
  chemically synthesized
ttttacactgtcataacctt

SEQ ID NO: 41063 - DNA, 20 bp, Artificial Sequence
  chemically synthesized
attggcagtgttattgggag

SEQ ID NO: 41064 - DNA, 20 bp, Artificial Sequence
  chemically synthesized
taatttatgggaacttaggc

SEQ ID NO: 41065 - DNA, 20 bp, Artificial Sequence
  chemically synthesized
gctcagaaaatattaaggaa

SEQ ID NO: 41066 - DNA, 20 bp, Artificial Sequence
  chemically synthesized
gtgcaaccatcatcatattt

SEQ ID NO: 41067 - DNA, 20 bp, Artificial Sequence
  chemically synthesized
ttctttatggttttaaaagc

SEQ ID NO: 41068 - DNA, 20 bp, Artificial Sequence
  chemically synthesized
ttaaaagcaaagaaaaaggt

SEQ ID NO: 41069 - DNA, 20 bp, Artificial Sequence
  chemically synthesized
gaagcccagctccctgtgat

SEQ ID NO: 41070 - DNA, 20 bp, Artificial Sequence
  chemically synthesized
aggcattgacagttgcaagg

SEQ ID NO: 41071 - DNA, 20 bp, Artificial Sequence
  chemically synthesized
gaccccagtctaagtgttgc

SEQ ID NO: 41072 - DNA, 20 bp, Artificial Sequence
  chemically synthesized
atttatttaagccacaacta

SEQ ID NO: 41073 - DNA, 20 bp, Artificial Sequence
  chemically synthesized
ttataacataatttataatt

SEQ ID NO: 41074 - DNA, 20 bp, Artificial Sequence
  chemically synthesized
ttatgattttattttatcca

SEQ ID NO: 41075 - DNA, 20 bp, Artificial Sequence
  chemically synthesized
ttttattttatccaaaagaa

SEQ ID NO: 41076 - DNA, 20 bp, Artificial Sequence
  chemically synthesized
gccagtggcatgggtctctg

SEQ ID NO: 41077 - DNA, 20 bp, Artificial Sequence
  chemically synthesized
gacatagtttttttaaatta

SEQ ID NO: 41078 - DNA, 20 bp, Artificial Sequence
  chemically synthesized
cacggtgctggaatgaatgg

SEQ ID NO: 41079 - DNA, 20 bp, Artificial Sequence
  chemically synthesized
tacatttgcttcttatccct

SEQ ID NO: 41080 - DNA, 20 bp, Artificial Sequence
  chemically synthesized
gtcatccccattttataaac

SEQ ID NO: 41081 - DNA, 20 bp, Artificial Sequence
  chemically synthesized
aattcccaaatcaaggaaat

SEQ ID NO: 41082 - DNA, 20 bp, Artificial Sequence
  chemically synthesized
ctggatttaagccagatttc

SEQ ID NO: 41083 - DNA, 20 bp, Artificial Sequence
  chemically synthesized
aggttaattgtttgccactt

SEQ ID NO: 41084 - DNA, 20 bp, Artificial Sequence
  chemically synthesized
agaagagagaagtctggtat

SEQ ID NO: 41085 - DNA, 20 bp, Artificial Sequence
  chemically synthesized
cttccaaagctagcttaggg

SEQ ID NO: 41086 - DNA, 20 bp, Artificial Sequence
  chemically synthesized
cgtactacttcactttagga

SEQ ID NO: 41087 - DNA, 20 bp, Artificial Sequence
  chemically synthesized
tgaatttagtggaagccatt

SEQ ID NO: 41088 - DNA, 20 bp, Artificial Sequence
  chemically synthesized
aagccattcaagaaaatatc

SEQ ID NO: 41089 - DNA, 20 bp, Artificial Sequence
  chemically synthesized
agccatgctcagtgagaagc

SEQ ID NO: 41090 - DNA, 20 bp, Artificial Sequence
  chemically synthesized
cattcacacaccacagtgag

SEQ ID NO: 41091 - DNA, 20 bp, Artificial Sequence
  chemically synthesized
atgagccctggaggtgaatc

SEQ ID NO: 41092 - DNA, 20 bp, Artificial Sequence
  chemically synthesized
gaaaaatcatcaggttaaaa

SEQ ID NO: 41093 - DNA, 20 bp, Artificial Sequence
  chemically synthesized
ttgaagtcacactgtgagct

SEQ ID NO: 41094 - DNA, 20 bp, Artificial Sequence
  chemically synthesized
cctggaaaagagagttcaaa

SEQ ID NO: 41095 - DNA, 20 bp, Artificial Sequence
  chemically synthesized
tgctttttagtggattaggt

SEQ ID NO: 41096 - DNA, 20 bp, Artificial Sequence
  chemically synthesized
gaggtcaggacaggcctttc

SEQ ID NO: 41097 - DNA, 20 bp, Artificial Sequence
  chemically synthesized
aggacaggcctttctgagaa

SEQ ID NO: 41098 - DNA, 20 bp, Artificial Sequence
  chemically synthesized
ccaccctttgccacaaccag

SEQ ID NO: 41099 - DNA, 20 bp, Artificial Sequence
  chemically synthesized
gttgcctcagatttgatctc

SEQ ID NO: 41100 - DNA, 20 bp, Artificial Sequence
  chemically synthesized
tacaaccaatgcacatattg

SEQ ID NO: 41101 - DNA, 20 bp, Artificial Sequence
  chemically synthesized
gcaggaggtggaagcccctg

SEQ ID NO: 41102 - DNA, 20 bp, Artificial Sequence
  chemically synthesized
ccctgagagaatggaggtct

SEQ ID NO: 41103 - DNA, 20 bp, Artificial Sequence
  chemically synthesized
ggaggagggggaatacctag

SEQ ID NO: 41104 - DNA, 20 bp, Artificial Sequence
  chemically synthesized
agggggaatacctaggtaga

SEQ ID NO: 41105 - DNA, 20 bp, Artificial Sequence
  chemically synthesized
ctcactgtgcagttaacttt

SEQ ID NO: 41106 - DNA, 20 bp, Artificial Sequence
  chemically synthesized
tagggagggaagagggcaaa

SEQ ID NO: 41107 - DNA, 20 bp, Artificial Sequence
  chemically synthesized
agaagcaatgcagccattac

SEQ ID NO: 41108 - DNA, 20 bp, Artificial Sequence
  chemically synthesized
acacctgtatcacaggtgtt

SEQ ID NO: 41109 - DNA, 20 bp, Artificial Sequence
  chemically synthesized
tatcacaggtgttaaagaaa

SEQ ID NO: 41110 - DNA, 20 bp, Artificial Sequence
  chemically synthesized
accgttaatgcccttgggct

SEQ ID NO: 41111 - DNA, 20 bp, Artificial Sequence
  chemically synthesized
acctccagcacacagcaggg

SEQ ID NO: 41112 - DNA, 20 bp, Artificial Sequence
  chemically synthesized
gctgcccccaagctgtagag

SEQ ID NO: 41113 - DNA, 20 bp, Artificial Sequence
  chemically synthesized
agagccagaatataaagctg

SEQ ID NO: 41114 - DNA, 20 bp, Artificial Sequence
  chemically synthesized
ccagaagtggttcttgagga

SEQ ID NO: 41115 - DNA, 20 bp, Artificial Sequence
  chemically synthesized
tgattgctcctaagttctct

SEQ ID NO: 41116 - DNA, 20 bp, Artificial Sequence
  chemically synthesized
gttctctggagaaagagatg

SEQ ID NO: 41117 - DNA, 20 bp, Artificial Sequence
  chemically synthesized
atgagagttttaactcctgt

SEQ ID NO: 41118 - DNA, 20 bp, Artificial Sequence
  chemically synthesized
ctgatgaaacttttttgcca

SEQ ID NO: 41119 - DNA, 20 bp, Artificial Sequence
  chemically synthesized
aagctttctaatttatattg

SEQ ID NO: 41120 - DNA, 20 bp, Artificial Sequence
  chemically synthesized
taatgttgcagctcggggac

SEQ ID NO: 41121 - DNA, 20 bp, Artificial Sequence
  chemically synthesized
cagcagaggcaaagcagcca

SEQ ID NO: 41122 - DNA, 20 bp, Artificial Sequence
  chemically synthesized
tataaacaaaaaactgccag

SEQ ID NO: 41123 - DNA, 20 bp, Artificial Sequence
  chemically synthesized
ctaatctgaattataaaaac

SEQ ID NO: 41124 - DNA, 20 bp, Artificial Sequence
  chemically synthesized
ccagggtaactgtgtgtact

SEQ ID NO: 41125 - DNA, 20 bp, Artificial Sequence
  chemically synthesized
aagggaagtaatgagacatt

SEQ ID NO: 41126 - DNA, 20 bp, Artificial Sequence
  chemically synthesized
atagacatacttattagctg

SEQ ID NO: 41127 - DNA, 20 bp, Artificial Sequence
  chemically synthesized
gccattagagctgtctctac

SEQ ID NO: 41128 - DNA, 20 bp, Artificial Sequence
  chemically synthesized
cgtttggcccctcttacaac

SEQ ID NO: 41129 - DNA, 20 bp, Artificial Sequence
  chemically synthesized
atgcatgtgtacacttgtgc

SEQ ID NO: 41130 - DNA, 20 bp, Artificial Sequence
  chemically synthesized
gtgttaatttgctcaagcaa

SEQ ID NO: 41131 - DNA, 20 bp, Artificial Sequence
  chemically synthesized
actgtaagtcagaaatgagc

SEQ ID NO: 41132 - DNA, 20 bp, Artificial Sequence
  chemically synthesized
aactctttctctacaggagt

SEQ ID NO: 41133 - DNA, 20 bp, Artificial Sequence
  chemically synthesized
tcagccaacaccagaagtcc

SEQ ID NO: 41134 - DNA, 20 bp, Artificial Sequence
  chemically synthesized
ctctgggagcttcaccccac

SEQ ID NO: 41135 - DNA, 20 bp, Artificial Sequence
  chemically synthesized
taggggcagggaccagtgca

SEQ ID NO: 41136 - DNA, 20 bp, Artificial Sequence
  chemically synthesized
atttaatatgctctatgctg

SEQ ID NO: 41137 - DNA, 20 bp, Artificial Sequence
  chemically synthesized
tatagctcacagtgtgactt

SEQ ID NO: 41138 - DNA, 20 bp, Artificial Sequence
  chemically synthesized
catgttgctaggaaatatcc

SEQ ID NO: 41139 - DNA, 20 bp, Artificial Sequence
  chemically synthesized
aatgtgccccccaggtcgat

SEQ ID NO: 41140 - DNA, 20 bp, Artificial Sequence
  chemically synthesized
catagacaccaatttcccca

SEQ ID NO: 41141 - DNA, 20 bp, Artificial Sequence
  chemically synthesized
aaaccaaagcatgcccacta

SEQ ID NO: 41142 - DNA, 20 bp, Artificial Sequence
  chemically synthesized
aaataattcttataatttaa

SEQ ID NO: 41143 - DNA, 20 bp, Artificial Sequence
  chemically synthesized
gacaagcctgggcaacatgc

SEQ ID NO: 41144 - DNA, 20 bp, Artificial Sequence
  chemically synthesized
taaataaatatttttaaaaa

SEQ ID NO: 41145 - DNA, 20 bp, Artificial Sequence
  chemically synthesized
gttaggaggctcctcccgtt

SEQ ID NO: 41146 - DNA, 20 bp, Artificial Sequence
  chemically synthesized
catataagagtctatgttcc

SEQ ID NO: 41147 - DNA, 20 bp, Artificial Sequence
  chemically synthesized
tttacctttttctttgcttt

SEQ ID NO: 41148 - DNA, 20 bp, Artificial Sequence
  chemically synthesized
gacagtgtaaaatgtcacta

SEQ ID NO: 41149 - DNA, 20 bp, Artificial Sequence
  chemically synthesized
gttgtgtttattcttttgtg

SEQ ID NO: 41150 - DNA, 20 bp, Artificial Sequence
  chemically synthesized
gcaaacatcctgataatggt

SEQ ID NO: 41151 - DNA, 20 bp, Artificial Sequence
  chemically synthesized
aaacatgaaggggagagcag

SEQ ID NO: 41152 - DNA, 20 bp, Artificial Sequence
  chemically synthesized
aactagaccatgaggtgcca

SEQ ID NO: 41153 - DNA, 20 bp, Artificial Sequence
  chemically synthesized
aagctgggcttgcaaaatta

SEQ ID NO: 41154 - DNA, 20 bp, Artificial Sequence
  chemically synthesized
ccctgggtgtgtccatctgg

SEQ ID NO: 41155 - DNA, 20 bp, Artificial Sequence
  chemically synthesized
atgaagatcatagcactata

SEQ ID NO: 41156 - DNA, 20 bp, Artificial Sequence
  chemically synthesized
tacaaaaagtctgaaaatat

SEQ ID NO: 41157 - DNA, 20 bp, Artificial Sequence
  chemically synthesized
taacataatttataattaca

SEQ ID NO: 41158 - DNA, 20 bp, Artificial Sequence
  chemically synthesized
agcctgctctgctacatttc

SEQ ID NO: 41159 - DNA, 20 bp, Artificial Sequence
  chemically synthesized
gatgcctatcaacaccttgg

SEQ ID NO: 41160 - DNA, 20 bp, Artificial Sequence
  chemically synthesized
agaaagagttgaaattgtga

SEQ ID NO: 41161 - DNA, 20 bp, Artificial Sequence
  chemically synthesized
ctacttgatttatataaaca

SEQ ID NO: 41162 - DNA, 20 bp, Artificial Sequence
  chemically synthesized
taaagactaatctgaattat

SEQ ID NO: 41163 - DNA, 20 bp, Artificial Sequence
  chemically synthesized
gacgttgattccagggtacc

SEQ ID NO: 41164 - DNA, 20 bp, Artificial Sequence
  chemically synthesized
cctagaaaaataaaaaaatc

SEQ ID NO: 41165 - DNA, 20 bp, Artificial Sequence
  chemically synthesized
ccacaccctcacagacataa

SEQ ID NO: 41166 - DNA, 20 bp, Artificial Sequence
  chemically synthesized
tgctgatatgaacaacactt

SEQ ID NO: 41167 - DNA, 20 bp, Artificial Sequence
  chemically synthesized
caaaatcctagaggtctcca

SEQ ID NO: 41168 - DNA, 20 bp, Artificial Sequence
  chemically synthesized
tcatgtggcccaaatggcag

SEQ ID NO: 41169 - DNA, 20 bp, Artificial Sequence
  chemically synthesized
cagctttcacagcagcctgg

SEQ ID NO: 41170 - DNA, 20 bp, Artificial Sequence
  chemically synthesized
gaggggccaaacgcagcaag

SEQ ID NO: 41171 - DNA, 20 bp, Artificial Sequence
  chemically synthesized
tagaaagtccctaaatttta

SEQ ID NO: 41172 - DNA, 20 bp, Artificial Sequence
  chemically synthesized
atgtctcaccaataagttca

SEQ ID NO: 41173 - DNA, 20 bp, Artificial Sequence
  chemically synthesized
agcgagcaaggtctctccaa

SEQ ID NO: 41174 - DNA, 20 bp, Artificial Sequence
  chemically synthesized
ggccttgtcagctgaaggca

SEQ ID NO: 41175 - DNA, 20 bp, Artificial Sequence
  chemically synthesized
caattggagtcaccacttgg

SEQ ID NO: 41176 - DNA, 20 bp, Artificial Sequence
  chemically synthesized
cagtccctccagggatggga

SEQ ID NO: 41177 - DNA, 20 bp, Artificial Sequence
  chemically synthesized
ctccagggatgggatattgt

SEQ ID NO: 41178 - DNA, 20 bp, Artificial Sequence
  chemically synthesized
ttctaggtagagacagctct

SEQ ID NO: 41179 - DNA, 20 bp, Artificial Sequence
  chemically synthesized
gtagagacagctctaatggc

SEQ ID NO: 41180 - DNA, 20 bp, Artificial Sequence
  chemically synthesized
ctttaactggggaaccacaa

SEQ ID NO: 41181 - DNA, 20 bp, Artificial Sequence
  chemically synthesized
gtaacaggttcgagtctgga

SEQ ID NO: 41182 - DNA, 20 bp, Artificial Sequence
  chemically synthesized
tctggaaattgattgagggc

SEQ ID NO: 41183 - DNA, 20 bp, Artificial Sequence
  chemically synthesized
ttgattgagggcccatgatt

SEQ ID NO: 41184 - DNA, 20 bp, Artificial Sequence
  chemically synthesized
atgattctctgtttttataa

SEQ ID NO: 41185 - DNA, 20 bp, Artificial Sequence
  chemically synthesized
gtctttagtccattctacct

SEQ ID NO: 41186 - DNA, 20 bp, Artificial Sequence
  chemically synthesized
gtccattctacctggcagtt

SEQ ID NO: 41187 - DNA, 20 bp, Artificial Sequence
  chemically synthesized
ataaatcaagtaggaataca

SEQ ID NO: 41188 - DNA, 20 bp, Artificial Sequence
  chemically synthesized
caatttcacttctaggaaca

SEQ ID NO: 41189 - DNA, 20 bp, Artificial Sequence
  chemically synthesized
atgagtcagactattctgat

SEQ ID NO: 41190 - DNA, 20 bp, Artificial Sequence
  chemically synthesized
gctctcacaaatctatttca

SEQ ID NO: 41191 - DNA, 20 bp, Artificial Sequence
  chemically synthesized
tgcctcagcctcccaagtag

SEQ ID NO: 41192 - DNA, 20 bp, Artificial Sequence
  chemically synthesized
ttttgtatttttagcagaga

SEQ ID NO: 41193 - DNA, 20 bp, Artificial Sequence
  chemically synthesized
cgcccccgcctcccaaggtg

SEQ ID NO: 41194 - DNA, 20 bp, Artificial Sequence
  chemically synthesized
agtagggccaaaccaataaa

SEQ ID NO: 41195 - DNA, 20 bp, Artificial Sequence
  chemically synthesized
atccattcccatgcctgttc

SEQ ID NO: 41196 - DNA, 20 bp, Artificial Sequence
  chemically synthesized
atttctgccaatataaatta

SEQ ID NO: 41197 - DNA, 20 bp, Artificial Sequence
  chemically synthesized
cactgttgcctcaagcagtg

SEQ ID NO: 41198 - DNA, 20 bp, Artificial Sequence
  chemically synthesized
accactactggggatgggga

SEQ ID NO: 41199 - DNA, 20 bp, Artificial Sequence
  chemically synthesized
gaaactgtttcttctggcaa

SEQ ID NO: 41200 - DNA, 20 bp, Artificial Sequence
  chemically synthesized
gagttcacaaactcagtgtc

SEQ ID NO: 41201 - DNA, 20 bp, Artificial Sequence
  chemically synthesized
agatcagctactcgcatgat

SEQ ID NO: 41202 - DNA, 20 bp, Artificial Sequence
  chemically synthesized
ctcgcatgataacagcttgt

SEQ ID NO: 41203 - DNA, 20 bp, Artificial Sequence
  chemically synthesized
ctctcattcagggcaatctt

SEQ ID NO: 41204 - DNA, 20 bp, Artificial Sequence
  chemically synthesized
tagcagatttgtggctcagt

SEQ ID NO: 41205 - DNA, 20 bp, Artificial Sequence
  chemically synthesized
tctagagggacagaactaat

SEQ ID NO: 41206 - DNA, 20 bp, Artificial Sequence
  chemically synthesized
atagatatactcacacaaag

SEQ ID NO: 41207 - DNA, 20 bp, Artificial Sequence
  chemically synthesized
ttattaagtggtattaactc

SEQ ID NO: 41208 - DNA, 20 bp, Artificial Sequence
  chemically synthesized
tagcctttttacatttttct

SEQ ID NO: 41209 - DNA, 20 bp, Artificial Sequence
  chemically synthesized
ccagctttatattctggctc

SEQ ID NO: 41210 - DNA, 20 bp, Artificial Sequence
  chemically synthesized
cagcaggggcaggggcctca

SEQ ID NO: 41211 - DNA, 20 bp, Artificial Sequence
  chemically synthesized
aaggactttcagtcacctct

SEQ ID NO: 41212 - DNA, 20 bp, Artificial Sequence
  chemically synthesized
agaggggctgtgggttgtct

SEQ ID NO: 41213 - DNA, 20 bp, Artificial Sequence
  chemically synthesized
tgagcccatactttaatctc

SEQ ID NO: 41214 - DNA, 20 bp, Artificial Sequence
  chemically synthesized
tttttaaaaatcatatttat

SEQ ID NO: 41215 - DNA, 20 bp, Artificial Sequence
  chemically synthesized
tattaagaatacaagaagta

SEQ ID NO: 41216 - DNA, 20 bp, Artificial Sequence
  chemically synthesized
aatacaagaagtacaatgtt

SEQ ID NO: 41217 - DNA, 20 bp, Artificial Sequence
  chemically synthesized
ttctttaacacctgtgatac

SEQ ID NO: 41218 - DNA, 20 bp, Artificial Sequence
  chemically synthesized
tgaattctacgtaatggctg

SEQ ID NO: 41219 - DNA, 20 bp, Artificial Sequence
  chemically synthesized
tgcaggacttgggtaatctc

SEQ ID NO: 41220 - DNA, 20 bp, Artificial Sequence
  chemically synthesized
acttgggtaatctctggggt

SEQ ID NO: 41221 - DNA, 20 bp, Artificial Sequence
  chemically synthesized
ctccagacctccattctctc

SEQ ID NO: 41222 - DNA, 20 bp, Artificial Sequence
  chemically synthesized
aaatcttaaataagaataaa

SEQ ID NO: 41223 - DNA, 20 bp, Artificial Sequence
  chemically synthesized
taagaataaatcatgtttgc

SEQ ID NO: 41224 - DNA, 20 bp, Artificial Sequence
  chemically synthesized
catcagtggcaactgtgttg

SEQ ID NO: 41225 - DNA, 20 bp, Artificial Sequence
  chemically synthesized
tagaaatgaaccttggaggc

SEQ ID NO: 41226 - DNA, 20 bp, Artificial Sequence
  chemically synthesized
aatgaaccttggaggccatt

SEQ ID NO: 41227 - DNA, 20 bp, Artificial Sequence
  chemically synthesized
caaagaaggccatttttgta

SEQ ID NO: 41228 - DNA, 20 bp, Artificial Sequence
  chemically synthesized
ccactattagttggggagaa

SEQ ID NO: 41229 - DNA, 20 bp, Artificial Sequence
  chemically synthesized
ttccaaggtgttgataggca

SEQ ID NO: 41230 - DNA, 20 bp, Artificial Sequence
  chemically synthesized
gaacctgggaccaatactgc

SEQ ID NO: 41231 - DNA, 20 bp, Artificial Sequence
  chemically synthesized
aggcaacaaatctgttcaaa

SEQ ID NO: 41232 - DNA, 20 bp, Artificial Sequence
  chemically synthesized
aggctccttaggacacctgg

SEQ ID NO: 41233 - DNA, 20 bp, Artificial Sequence
  chemically synthesized
tccatctctggcacaaaatg

SEQ ID NO: 41234 - DNA, 20 bp, Artificial Sequence
  chemically synthesized
ggctaataaaatgaagatag

SEQ ID NO: 41235 - DNA, 20 bp, Artificial Sequence
  chemically synthesized
gatgacacactgcagagaac

SEQ ID NO: 41236 - DNA, 20 bp, Artificial Sequence
  chemically synthesized
atccagtagaaaggcagatg

SEQ ID NO: 41237 - DNA, 20 bp, Artificial Sequence
  chemically synthesized
caaggaggaggatgcacgct

SEQ ID NO: 41238 - DNA, 20 bp, Artificial Sequence
  chemically synthesized
aatatgctctatgctggaaa

SEQ ID NO: 41239 - DNA, 20 bp, Artificial Sequence
  chemically synthesized
atatccatgtcttcaccccg

SEQ ID NO: 41240 - DNA, 20 bp, Artificial Sequence
  chemically synthesized
actctcttttccaggaagag

SEQ ID NO: 41241 - DNA, 20 bp, Artificial Sequence
  chemically synthesized
aaacacacaataaattaata

SEQ ID NO: 41242 - DNA, 20 bp, Artificial Sequence
  chemically synthesized
gttcagttaaacattttgaa

SEQ ID NO: 41243 - DNA, 20 bp, Artificial Sequence
  chemically synthesized
cctgtaactgtgtcatttta

SEQ ID NO: 41244 - DNA, 20 bp, Artificial Sequence
  chemically synthesized
caatttttctttttttaacc

SEQ ID NO: 41245 - DNA, 20 bp, Artificial Sequence
  chemically synthesized
tgatgatttttccacaatcc

SEQ ID NO: 41246 - DNA, 20 bp, Artificial Sequence
  chemically synthesized
tttccacaatccttttgttt

SEQ ID NO: 41247 - DNA, 20 bp, Artificial Sequence
  chemically synthesized
ctccagggctcatatggcaa

SEQ ID NO: 41248 - DNA, 20 bp, Artificial Sequence
  chemically synthesized
atatggcaatggggatttaa

SEQ ID NO: 41249 - DNA, 20 bp, Artificial Sequence
  chemically synthesized
cttagcaatttgtgaataga

SEQ ID NO: 41250 - DNA, 20 bp, Artificial Sequence
  chemically synthesized
tttgtgaatagaagatgttt

SEQ ID NO: 41251 - DNA, 20 bp, Artificial Sequence
  chemically synthesized
gataacacgtccacagaaag

SEQ ID NO: 41252 - DNA, 20 bp, Artificial Sequence
  chemically synthesized
cagaaagcctggctttccaa

SEQ ID NO: 41253 - DNA, 20 bp, Artificial Sequence
  chemically synthesized
atcagagaatgtgcccccca

SEQ ID NO: 41254 - DNA, 20 bp, Artificial Sequence
  chemically synthesized
atatgttaatcctgtggcag

SEQ ID NO: 41255 - DNA, 20 bp, Artificial Sequence
  chemically synthesized
aagttcacagtgatctacat

SEQ ID NO: 41256 - DNA, 20 bp, Artificial Sequence
  chemically synthesized
accaatttccccaaaaaact

SEQ ID NO: 41257 - DNA, 20 bp, Artificial Sequence
  chemically synthesized
ttttctttgatattttcttg

SEQ ID NO: 41258 - DNA, 20 bp, Artificial Sequence
  chemically synthesized
atggcttccactaaattcaa

SEQ ID NO: 41259 - DNA, 20 bp, Artificial Sequence
  chemically synthesized
taaaattttatctggtaatt

SEQ ID NO: 41260 - DNA, 20 bp, Artificial Sequence
  chemically synthesized
gcaagttcatctaactatgt

SEQ ID NO: 41261 - DNA, 20 bp, Artificial Sequence
  chemically synthesized
gatggaactcctgagttcac

SEQ ID NO: 41262 - DNA, 20 bp, Artificial Sequence
  chemically synthesized
actacaaaactctcaccctc

SEQ ID NO: 41263 - DNA, 20 bp, Artificial Sequence
  chemically synthesized
tgctgcatttcttcccctaa

SEQ ID NO: 41264 - DNA, 20 bp, Artificial Sequence
  chemically synthesized
accagacttctctcttctta

SEQ ID NO: 41265 - DNA, 20 bp, Artificial Sequence
  chemically synthesized
tgctcttcagttacattgga

SEQ ID NO: 41266 - DNA, 20 bp, Artificial Sequence
  chemically synthesized
ttcagttacattggaatgtg

SEQ ID NO: 41267 - DNA, 20 bp, Artificial Sequence
  chemically synthesized
gatgaaaaagtgagaagagc

SEQ ID NO: 41268 - DNA, 20 bp, Artificial Sequence
  chemically synthesized
cctagattttttcttggaaa

SEQ ID NO: 41269 - DNA, 20 bp, Artificial Sequence
  chemically synthesized
cttggaaatctggcttaaat

SEQ ID NO: 41270 - DNA, 20 bp, Artificial Sequence
  chemically synthesized
aaatccaggtttctttattt

SEQ ID NO: 41271 - DNA, 20 bp, Artificial Sequence
  chemically synthesized
atttggtcacgagacaaata

SEQ ID NO: 41272 - DNA, 20 bp, Artificial Sequence
  chemically synthesized
aataacatgattttcctaag

SEQ ID NO: 41273 - DNA, 20 bp, Artificial Sequence
  chemically synthesized
attttcctaagtctagattt

SEQ ID NO: 41274 - DNA, 20 bp, Artificial Sequence
  chemically synthesized
acatattcaaagagttattt

SEQ ID NO: 41275 - DNA, 20 bp, Artificial Sequence
  chemically synthesized
atgaaactgagaaccaagcg

SEQ ID NO: 41276 - DNA, 20 bp, Artificial Sequence
  chemically synthesized
ccatcatgtaggcacactct

SEQ ID NO: 41277 - DNA, 20 bp, Artificial Sequence
  chemically synthesized
taagaatttttcaatcatat

SEQ ID NO: 41278 - DNA, 20 bp, Artificial Sequence
  chemically synthesized
atttaaaaaaactatgtctt

SEQ ID NO: 41279 - DNA, 20 bp, Artificial Sequence
  chemically synthesized
accagatagtcaaattaagt

SEQ ID NO: 41280 - DNA, 20 bp, Artificial Sequence
  chemically synthesized
cacccctagaccttcatctt

SEQ ID NO: 41281 - DNA, 20 bp, Artificial Sequence
  chemically synthesized
ccttcatctttcctgattag

SEQ ID NO: 41282 - DNA, 20 bp, Artificial Sequence
  chemically synthesized
ctgcacatccatagcctccc

SEQ ID NO: 41283 - DNA, 20 bp, Artificial Sequence
  chemically synthesized
tagacacaaccctttcaggt

SEQ ID NO: 41284 - DNA, 20 bp, Artificial Sequence
  chemically synthesized
tatttattcctagtgaactc

SEQ ID NO: 41285 - DNA, 20 bp, Artificial Sequence
  chemically synthesized
cagatggatcacctgaggcc

SEQ ID NO: 41286 - DNA, 20 bp, Artificial Sequence
  chemically synthesized
taagtaggctgaggcactag

SEQ ID NO: 41287 - DNA, 20 bp, Artificial Sequence
  chemically synthesized
atccttcctattctagtagt

SEQ ID NO: 41288 - DNA, 20 bp, Artificial Sequence
  chemically synthesized
gacaggtggatcacaaggtc

SEQ ID NO: 41289 - DNA, 20 bp, Artificial Sequence
  chemically synthesized
caagatggttaggaggctcc

SEQ ID NO: 41290 - DNA, 20 bp, Artificial Sequence
  chemically synthesized
atacatttgggacagatcta

SEQ ID NO: 41291 - DNA, 20 bp, Artificial Sequence
  chemically synthesized
acacttagactggggtcttc

SEQ ID NO: 41292 - DNA, 20 bp, Artificial Sequence
  chemically synthesized
aaatgcccagcacagagctc

SEQ ID NO: 41293 - DNA, 20 bp, Artificial Sequence
  chemically synthesized
ctcttccattcagaaactca

SEQ ID NO: 41294 - DNA, 20 bp, Artificial Sequence
  chemically synthesized
tcattctcaatcacagggag

SEQ ID NO: 41295 - DNA, 20 bp, Artificial Sequence
  chemically synthesized
aaagccagccccaaaggtac

SEQ ID NO: 41296 - DNA, 20 bp, Artificial Sequence
  chemically synthesized
aagagtctatgttccaaaaa

SEQ ID NO: 41297 - DNA, 20 bp, Artificial Sequence
  chemically synthesized
aaaaacctggatttaacaat

SEQ ID NO: 41298 - DNA, 20 bp, Artificial Sequence
  chemically synthesized
taacaatctgagctttgtca

SEQ ID NO: 41299 - DNA, 20 bp, Artificial Sequence
  chemically synthesized
catggtgctttgcggttggt

SEQ ID NO: 41300 - DNA, 20 bp, Artificial Sequence
  chemically synthesized
tgttgtttctttaccttttt

SEQ ID NO: 41301 - DNA, 20 bp, Artificial Sequence
  chemically synthesized
gcttttaaaaccataaagaa

SEQ ID NO: 41302 - DNA, 20 bp, Artificial Sequence
  chemically synthesized
agtctgagaaatgcaattgc

SEQ ID NO: 41303 - DNA, 20 bp, Artificial Sequence
  chemically synthesized
tttatattttcagacttttt

SEQ ID NO: 41304 - DNA, 20 bp, Artificial Sequence
  chemically synthesized
tcatatcacaaaatttcaca

SEQ ID NO: 41305 - DNA, 20 bp, Artificial Sequence
  chemically synthesized
ttttcactcaacattacata

SEQ ID NO: 41306 - DNA, 20 bp, Artificial Sequence
  chemically synthesized
ctaatattttaaaggagagc

SEQ ID NO: 41307 - DNA, 20 bp, Artificial Sequence
  chemically synthesized
gagctactgattaatgagca

SEQ ID NO: 41308 - DNA, 20 bp, Artificial Sequence
  chemically synthesized
aagcattatcctttccaggc

SEQ ID NO: 41309 - DNA, 20 bp, Artificial Sequence
  chemically synthesized
ggtctgcggagtcactgccc

SEQ ID NO: 41310 - DNA, 20 bp, Artificial Sequence
  chemically synthesized
cccgtgcgcgttggcccccc

SEQ ID NO: 41311 - DNA, 20 bp, Artificial Sequence
  chemically synthesized
aatctaacaggttgaaattg

SEQ ID NO: 41312 - DNA, 20 bp, Artificial Sequence
  chemically synthesized
tctttgacaatttgggagag

SEQ ID NO: 41313 - DNA, 20 bp, Artificial Sequence
  chemically synthesized
gagagtgaagattctcctgg

SEQ ID NO: 41314 - DNA, 20 bp, Artificial Sequence
  chemically synthesized
gtgtttattcttttgtgaaa

SEQ ID NO: 41315 - DNA, 20 bp, Artificial Sequence
  chemically synthesized
tgcaaaattgccagaggaaa

SEQ ID NO: 41316 - DNA, 20 bp, Artificial Sequence
  chemically synthesized
ttccagatggacacacccag

SEQ ID NO: 41317 - DNA, 20 bp, Artificial Sequence
  chemically synthesized
ttcagtgttctcacaaataa

SEQ ID NO: 41318 - DNA, 20 bp, Artificial Sequence
  chemically synthesized
cagttttctaattttgcaag

SEQ ID NO: 41319 - DNA, 20 bp, Artificial Sequence
  chemically synthesized
cattagaattttgcaaaaat

SEQ ID NO: 41320 - DNA, 20 bp, Artificial Sequence
  chemically synthesized
gttgacatgagcagcatgga

SEQ ID NO: 41321 - DNA, 20 bp, Artificial Sequence
  chemically synthesized
tctgggcagagctgcatgat

SEQ ID NO: 41322 - DNA, 20 bp, Artificial Sequence
  chemically synthesized
caggtaggccacaggtgaca

SEQ ID NO: 41323 - DNA, 20 bp, Artificial Sequence
  chemically synthesized
gtccagcggcaggatcagtc

SEQ ID NO: 41324 - DNA, 20 bp, Artificial Sequence
  chemically synthesized
aattgatgaacaggcctgag

SEQ ID NO: 41325 - DNA, 20 bp, Artificial Sequence
  chemically synthesized
gctaatggtggtggtaatga

SEQ ID NO: 41326 - DNA, 20 bp, Artificial Sequence
  chemically synthesized
tcatcagtagacatcatata

SEQ ID NO: 41327 - DNA, 20 bp, Artificial Sequence
  chemically synthesized
tagctggcccagagcctact

SEQ ID NO: 41328 - DNA, 20 bp, Artificial Sequence
  chemically synthesized
tttctaaccaccatccccca

SEQ ID NO: 41329 - DNA, 20 bp, Artificial Sequence
  chemically synthesized
cacctgcaggtccactgaga

SEQ ID NO: 41330 - DNA, 20 bp, Artificial Sequence
  chemically synthesized
tcagcctctgagagggaggt

SEQ ID NO: 41331 - DNA, 20 bp, Artificial Sequence
  chemically synthesized
aagttttcctgctctcccct

SEQ ID NO: 41332 - DNA, 20 bp, Artificial Sequence
  chemically synthesized
tccctgacttggatcaaatg

SEQ ID NO: 41333 - DNA, 20 bp, Artificial Sequence
  chemically synthesized
gtttggaggtgttgaggcca

SEQ ID NO: 41334 - DNA, 20 bp, Artificial Sequence
  chemically synthesized
ctccccaaggccccatcagg

SEQ ID NO: 41335 - DNA, 20 bp, Artificial Sequence
  chemically synthesized
aactttcctggcaacttgcg

SEQ ID NO: 41336 - DNA, 20 bp, Artificial Sequence
  chemically synthesized
gtaggttttcaccattatca

SEQ ID NO: 41337 - DNA, 20 bp, Artificial Sequence
  chemically synthesized
gatgtttgccttgctcaaat

SEQ ID NO: 41338 - DNA, 20 bp, Artificial Sequence
  chemically synthesized
caggtgatgcaccctctgcc

SEQ ID NO: 41339 - DNA, 20 bp, Artificial Sequence
  chemically synthesized
acttccatcatgcagctctg

SEQ ID NO: 41340 - DNA, 20 bp, Artificial Sequence
  chemically synthesized
catgtcaactccagatgcag

SEQ ID NO: 41341 - DNA, 20 bp, Artificial Sequence
  chemically synthesized
cctgtgccatgctcgcaaag

SEQ ID NO: 41342 - DNA, 20 bp, Artificial Sequence
  chemically synthesized
ttgcaaaattctaatgaaag

SEQ ID NO: 41343 - DNA, 20 bp, Artificial Sequence
  chemically synthesized
tgggcttgcaaaattagaaa

SEQ ID NO: 41344 - DNA, 20 bp, Artificial Sequence
  chemically synthesized
gaatttggcaaagaaaataa

SEQ ID NO: 41345 - DNA, 20 bp, Artificial Sequence
  chemically synthesized
aatcaggacaatttcaacct

SEQ ID NO: 41346 - DNA, 20 bp, Artificial Sequence
  chemically synthesized
acactcatacaagtgtggtg

SEQ ID NO: 41347 - DNA, 20 bp, Artificial Sequence
  chemically synthesized
tcatacaagtgtggtgaagt

SEQ ID NO: 41348 - DNA, 20 bp, Artificial Sequence
  chemically synthesized
actagacaacctccttacac

SEQ ID NO: 41349 - DNA, 20 bp, Artificial Sequence
  chemically synthesized
agagcaggagtgatggaact

SEQ ID NO: 41350 - DNA, 20 bp, Artificial Sequence
  chemically synthesized
gaagtgagatacaccacatt

SEQ ID NO: 41351 - DNA, 20 bp, Artificial Sequence
  chemically synthesized
aagcttgtgcctggaaagga

SEQ ID NO: 41352 - DNA, 20 bp, Artificial Sequence
  chemically synthesized
tacatttaaacattattctt

SEQ ID NO: 41353 - DNA, 20 bp, Artificial Sequence
  chemically synthesized
cgcaaagcaccatgacaaag

SEQ ID NO: 41354 - DNA, 20 bp, Artificial Sequence
  chemically synthesized
caaagctcagattgttaaat

SEQ ID NO: 41355 - DNA, 20 bp, Artificial Sequence
  chemically synthesized
ttggaacatagactcttata

SEQ ID NO: 41356 - DNA, 20 bp, Artificial Sequence
  chemically synthesized
tcaccactgctctgttcttc

SEQ ID NO: 41357 - DNA, 20 bp, Artificial Sequence
  chemically synthesized
taaacacaggtacctttggg

SEQ ID NO: 41358 - DNA, 20 bp, Artificial Sequence
  chemically synthesized
tctcaaggaagcccagctcc

SEQ ID NO: 41359 - DNA, 20 bp, Artificial Sequence
  chemically synthesized
gaatgaagtgtgcaatcgct

SEQ ID NO: 41360 - DNA, 20 bp, Artificial Sequence
  chemically synthesized
tcccaaagtagcgaattcaa

SEQ ID NO: 41361 - DNA, 20 bp, Artificial Sequence
  chemically synthesized
gatcatccaaggggacttct

SEQ ID NO: 41362 - DNA, 20 bp, Artificial Sequence
  chemically synthesized
ccggtggccagggactaaag

SEQ ID NO: 41363 - DNA, 20 bp, Artificial Sequence
  chemically synthesized
cagagttggcgtgtctcccc

SEQ ID NO: 41364 - DNA, 20 bp, Artificial Sequence
  chemically synthesized
ctccccaattgatttacaac

SEQ ID NO: 41365 - DNA, 20 bp, Artificial Sequence
  chemically synthesized
atttacaactggggcttgga

SEQ ID NO: 41366 - DNA, 20 bp, Artificial Sequence
  chemically synthesized
tttccacttaattctaccac

SEQ ID NO: 41367 - DNA, 20 bp, Artificial Sequence
  chemically synthesized
tacttcatgagaacgaaaat

SEQ ID NO: 41368 - DNA, 20 bp, Artificial Sequence
  chemically synthesized
gcaccatgaattcatttgcg

SEQ ID NO: 41369 - DNA, 20 bp, Artificial Sequence
  chemically synthesized
catttgcggaaagattgata

SEQ ID NO: 41370 - DNA, 20 bp, Artificial Sequence
  chemically synthesized
accccggttgaagtgcactg

SEQ ID NO: 41371 - DNA, 20 bp, Artificial Sequence
  chemically synthesized
tactccagcctccctagtag

SEQ ID NO: 41372 - DNA, 20 bp, Artificial Sequence
  chemically synthesized
ttttgtatttttagtagaga

SEQ ID NO: 41373 - DNA, 20 bp, Artificial Sequence
  chemically synthesized
tgtcttggcctcccaaagtg

SEQ ID NO: 41374 - DNA, 20 bp, Artificial Sequence
  chemically synthesized
ttgagccaccgcactcgacc

SEQ ID NO: 41375 - DNA, 20 bp, Artificial Sequence
  chemically synthesized
agccacaactactagaatag

SEQ ID NO: 41376 - DNA, 20 bp, Artificial Sequence
  chemically synthesized
ttttgtattttttgtagaga

SEQ ID NO: 41377 - DNA, 20 bp, Artificial Sequence
  chemically synthesized
acagggttttggcatgttgc

SEQ ID NO: 41378 - DNA, 20 bp, Artificial Sequence
  chemically synthesized
tgccgtggcctcccaaaatg

SEQ ID NO: 41379 - DNA, 20 bp, Artificial Sequence
  chemically synthesized
tgagccaccaccccctcctg

SEQ ID NO: 41380 - DNA, 20 bp, Artificial Sequence
  chemically synthesized
aaataaattttgaagataat

SEQ ID NO: 41381 - DNA, 20 bp, Artificial Sequence
  chemically synthesized
cacttatgttgtcatttcgg

SEQ ID NO: 41382 - DNA, 20 bp, Artificial Sequence
  chemically synthesized
tggagatgttaacatttata

SEQ ID NO: 41383 - DNA, 20 bp, Artificial Sequence
  chemically synthesized
tcgtacagcactgcctgttg

SEQ ID NO: 41384 - DNA, 20 bp, Artificial Sequence
  chemically synthesized
ccagcaaatatgagctactt

SEQ ID NO: 41385 - DNA, 20 bp, Artificial Sequence
  chemically synthesized
gtggagcagctgagggggga

SEQ ID NO: 41386 - DNA, 20 bp, Artificial Sequence
  chemically synthesized
ataagactctatattcaagg

SEQ ID NO: 41387 - DNA, 20 bp, Artificial Sequence
  chemically synthesized
tcattaacttaatttgacta

SEQ ID NO: 41388 - DNA, 20 bp, Artificial Sequence
  chemically synthesized
tttgactatctggtttgtgg

SEQ ID NO: 41389 - DNA, 20 bp, Artificial Sequence
  chemically synthesized
tcatgtaagtcaacaatgtc

SEQ ID NO: 41390 - DNA, 20 bp, Artificial Sequence
  chemically synthesized
atttctgaaatcaggtaaga

SEQ ID NO: 41391 - DNA, 20 bp, Artificial Sequence
  chemically synthesized
tgtagtaaaaatacatatgc

SEQ ID NO: 41392 - DNA, 20 bp, Artificial Sequence
  chemically synthesized
ttatgtgcaattcatttaat

SEQ ID NO: 41393 - DNA, 20 bp, Artificial Sequence
  chemically synthesized
ttcccagttcaaaatcttgt

SEQ ID NO: 41394 - DNA, 20 bp, Artificial Sequence
  chemically synthesized
attgaaaaattcttaaaaaa

SEQ ID NO: 41395 - DNA, 20 bp, Artificial Sequence
  chemically synthesized
gaatgggcagaaaaaataat

SEQ ID NO: 41396 - DNA, 20 bp, Artificial Sequence
  chemically synthesized
atgcaaaggatggctaagct

SEQ ID NO: 41397 - DNA, 20 bp, Artificial Sequence
  chemically synthesized
gctaagctcttcgcttggtt

SEQ ID NO: 41398 - DNA, 20 bp, Artificial Sequence
  chemically synthesized
acaatgaaataactctttga

SEQ ID NO: 41399 - DNA, 20 bp, Artificial Sequence
  chemically synthesized
tctctttgttatggcctgag

SEQ ID NO: 41400 - DNA, 20 bp, Artificial Sequence
  chemically synthesized
aaggctttccatcggtatac

SEQ ID NO: 41401 - DNA, 20 bp, Artificial Sequence
  chemically synthesized
tgccagatgatatacgcata

SEQ ID NO: 41402 - DNA, 20 bp, Artificial Sequence
  chemically synthesized
catacacacatacacaccgt

SEQ ID NO: 41403 - DNA, 20 bp, Artificial Sequence
  chemically synthesized
agtgtgtgtcctttacaaat

SEQ ID NO: 41404 - DNA, 20 bp, Artificial Sequence
  chemically synthesized
aaatcaaggaaataaagaaa

SEQ ID NO: 41405 - DNA, 20 bp, Artificial Sequence
  chemically synthesized
ataaagaaacctggatttaa

SEQ ID NO: 41406 - DNA, 20 bp, Artificial Sequence
  chemically synthesized
atgtaactgaagagcaggtt

SEQ ID NO: 41407 - DNA, 20 bp, Artificial Sequence
  chemically synthesized
agagaagtctggtataaaga

SEQ ID NO: 41408 - DNA, 20 bp, Artificial Sequence
  chemically synthesized
agtctggtataaagaaagtg

SEQ ID NO: 41409 - DNA, 20 bp, Artificial Sequence
  chemically synthesized
gaaagtgatttgcttccaaa

SEQ ID NO: 41410 - DNA, 20 bp, Artificial Sequence
  chemically synthesized
aaggcaacagaggaggcgag

SEQ ID NO: 41411 - DNA, 20 bp, Artificial Sequence
  chemically synthesized
gcaaggattcaggggtccat

SEQ ID NO: 41412 - DNA, 20 bp, Artificial Sequence
  chemically synthesized
gaggcaaatctctggagggt

SEQ ID NO: 41413 - DNA, 20 bp, Artificial Sequence
  chemically synthesized
gggtgagagttttgtagtgg

SEQ ID NO: 41414 - DNA, 20 bp, Artificial Sequence
  chemically synthesized
gagttttgtagtgggcatgc

SEQ ID NO: 41415 - DNA, 20 bp, Artificial Sequence
  chemically synthesized
gagtctgatgaaagggaggt

SEQ ID NO: 41416 - DNA, 20 bp, Artificial Sequence
  chemically synthesized
caaagaaaatacagagcagg

SEQ ID NO: 41417 - DNA, 20 bp, Artificial Sequence
  chemically synthesized
gagcaggagaagattaagca

SEQ ID NO: 41418 - DNA, 20 bp, Artificial Sequence
  chemically synthesized
ctagaacaaacttctctgcc

SEQ ID NO: 41419 - DNA, 20 bp, Artificial Sequence
  chemically synthesized
ttctctgccacaggattaac

SEQ ID NO: 41420 - DNA, 20 bp, Artificial Sequence
  chemically synthesized
tgataagctcttttggaaag

SEQ ID NO: 41421 - DNA, 20 bp, Artificial Sequence
  chemically synthesized
tggaatgcccggggagagga

SEQ ID NO: 41422 - DNA, 20 bp, Artificial Sequence
  chemically synthesized
ataaaagtatttttcctatt

SEQ ID NO: 41423 - DNA, 20 bp, Artificial Sequence
  chemically synthesized
agtatttttcctattaaaag

SEQ ID NO: 41424 - DNA, 20 bp, Artificial Sequence
  chemically synthesized
ttcctattaaaagatttgtt

SEQ ID NO: 41425 - DNA, 20 bp, Artificial Sequence
  chemically synthesized
ggaggtgaatcagagaaaca

SEQ ID NO: 41426 - DNA, 20 bp, Artificial Sequence
  chemically synthesized
catcaggttaaaaaaagaaa

SEQ ID NO: 41427 - DNA, 20 bp, Artificial Sequence
  chemically synthesized
gttaaaaaaagaaaaattga

SEQ ID NO: 41428 - DNA, 20 bp, Artificial Sequence
  chemically synthesized
agttaaagggggaaataaat

SEQ ID NO: 41429 - DNA, 20 bp, Artificial Sequence
  chemically synthesized
catttcaaaaacactcttca

SEQ ID NO: 41430 - DNA, 20 bp, Artificial Sequence
  chemically synthesized
aagcaccttattaatttatt

SEQ ID NO: 41431 - DNA, 20 bp, Artificial Sequence
  chemically synthesized
gatattttgatatatctatc

SEQ ID NO: 41432 - DNA, 20 bp, Artificial Sequence
  chemically synthesized
atatctatcaagtgcttttt

SEQ ID NO: 41433 - DNA, 20 bp, Artificial Sequence
  chemically synthesized
agccaatgcctgttcaataa

SEQ ID NO: 41434 - DNA, 20 bp, Artificial Sequence
  chemically synthesized
cctgtattccctagaagtct

SEQ ID NO: 41435 - DNA, 20 bp, Artificial Sequence
  chemically synthesized
aagtctcgctgctttcagag

SEQ ID NO: 41436 - DNA, 20 bp, Artificial Sequence
  chemically synthesized
caaagtggtcaaggttgtcc

SEQ ID NO: 41437 - DNA, 20 bp, Artificial Sequence
  chemically synthesized
gtcctgttgcttaattccat

SEQ ID NO: 41438 - DNA, 20 bp, Artificial Sequence
  chemically synthesized
cagagatggagctggcatct

SEQ ID NO: 41439 - DNA, 20 bp, Artificial Sequence
  chemically synthesized
tttgccacaaccaggcagaa

SEQ ID NO: 41440 - DNA, 20 bp, Artificial Sequence
  chemically synthesized
caggcagaaagcagcttttg

SEQ ID NO: 41441 - DNA, 20 bp, Artificial Sequence
  chemically synthesized
cttttgaacagatttgttgc

SEQ ID NO: 41442 - DNA, 20 bp, Artificial Sequence
  chemically synthesized
tgggcagtattggtcccagg

SEQ ID NO: 41443 - DNA, 20 bp, Artificial Sequence
  chemically synthesized
aaaaatggccttctttgtgg

SEQ ID NO: 41444 - DNA, 20 bp, Artificial Sequence
  chemically synthesized
cttcatatcctccatttttt

SEQ ID NO: 41445 - DNA, 20 bp, Artificial Sequence
  chemically synthesized
taaaggagggaccattcaga

SEQ ID NO: 41446 - DNA, 20 bp, Artificial Sequence
  chemically synthesized
ctccaaggttcatttctaca

SEQ ID NO: 41447 - DNA, 20 bp, Artificial Sequence
  chemically synthesized
gacatggcaatcaagagcaa

SEQ ID NO: 41448 - DNA, 20 bp, Artificial Sequence
  chemically synthesized
caaacatgatttattcttat

SEQ ID NO: 41449 - DNA, 20 bp, Artificial Sequence
  chemically synthesized
gtctggagaatctgaaaccc

SEQ ID NO: 41450 - DNA, 20 bp, Artificial Sequence
  chemically synthesized
tgtacttcttgtattcttaa

SEQ ID NO: 41451 - DNA, 20 bp, Artificial Sequence
  chemically synthesized
atcactgcaaacctctataa

SEQ ID NO: 41452 - DNA, 20 bp, Artificial Sequence
  chemically synthesized
ctacgcattgacttatcttc

SEQ ID NO: 41453 - DNA, 20 bp, Artificial Sequence
  chemically synthesized
cgttgtactttcttccttac

SEQ ID NO: 41454 - DNA, 20 bp, Artificial Sequence
  chemically synthesized
ccactgtttatctcaaactc

SEQ ID NO: 41455 - DNA, 20 bp, Artificial Sequence
  chemically synthesized
tatgggctcaggagggagcg

SEQ ID NO: 41456 - DNA, 20 bp, Artificial Sequence
  chemically synthesized
gccttatggaaaagtggcca

SEQ ID NO: 41457 - DNA, 20 bp, Artificial Sequence
  chemically synthesized
cattttagtcagtgttggct

SEQ ID NO: 41458 - DNA, 20 bp, Artificial Sequence
  chemically synthesized
cagtaccaccgttaatgccc

SEQ ID NO: 41459 - DNA, 20 bp, Artificial Sequence
  chemically synthesized
gcacacagcagggaaagaat

SEQ ID NO: 41460 - DNA, 20 bp, Artificial Sequence
  chemically synthesized
aattccagtttctctttctt

SEQ ID NO: 41461 - DNA, 20 bp, Artificial Sequence
  chemically synthesized
actcttcaccaggcaaggct

SEQ ID NO: 41462 - DNA, 20 bp, Artificial Sequence
  chemically synthesized
acatttccactggctgcact

SEQ ID NO: 41463 - DNA, 20 bp, Artificial Sequence
  chemically synthesized
agggaaggaaaaaagatcct

SEQ ID NO: 41464 - DNA, 20 bp, Artificial Sequence
  chemically synthesized
gaaaaatgtaaaaaggctag

SEQ ID NO: 41465 - DNA, 20 bp, Artificial Sequence
  chemically synthesized
ttggactgtcttccttgctc

SEQ ID NO: 41466 - DNA, 20 bp, Artificial Sequence
  chemically synthesized
ctctagagaaccccgactaa

SEQ ID NO: 41467 - DNA, 20 bp, Artificial Sequence
  chemically synthesized
attaaggatggaattctttc

SEQ ID NO: 41468 - DNA, 20 bp, Artificial Sequence
  chemically synthesized
gttttgggacttctggtgtt

SEQ ID NO: 41469 - DNA, 20 bp, Artificial Sequence
  chemically synthesized
cttctggtgttggctgatta

SEQ ID NO: 41470 - DNA, 20 bp, Artificial Sequence
  chemically synthesized
cactgatagtacttggcctg

SEQ ID NO: 41471 - DNA, 20 bp, Artificial Sequence
  chemically synthesized
aaaataaatgcatttgacac

SEQ ID NO: 41472 - DNA, 20 bp, Artificial Sequence
  chemically synthesized
ttcatcacttatgagaggca

SEQ ID NO: 41473 - DNA, 20 bp, Artificial Sequence
  chemically synthesized
ccaaggaacataatgaagtt

SEQ ID NO: 41474 - DNA, 20 bp, Artificial Sequence
  chemically synthesized
gatactgagccacaaatctg

SEQ ID NO: 41475 - DNA, 20 bp, Artificial Sequence
  chemically synthesized
ctgctaagattgccctgaat

SEQ ID NO: 41476 - DNA, 20 bp, Artificial Sequence
  chemically synthesized
ggtgcatgcacagccttgcc

SEQ ID NO: 41477 - DNA, 20 bp, Artificial Sequence
  chemically synthesized
ccctgatgaagctgaggaca

SEQ ID NO: 41478 - DNA, 20 bp, Artificial Sequence
  chemically synthesized
gaaacttttttgccagaaga

SEQ ID NO: 41479 - DNA, 20 bp, Artificial Sequence
  chemically synthesized
gtctgaggatgtaaaccctg

SEQ ID NO: 41480 - DNA, 20 bp, Artificial Sequence
  chemically synthesized
gcagctgccaggcaagataa

SEQ ID NO: 41481 - DNA, 20 bp, Artificial Sequence
  chemically synthesized
gaggcacccctaatgcccct

SEQ ID NO: 41482 - DNA, 20 bp, Artificial Sequence
  chemically synthesized
ggtgcattatactctaaaag

SEQ ID NO: 41483 - DNA, 20 bp, Artificial Sequence
  chemically synthesized
ttatactctaaaagaactgc

SEQ ID NO: 41484 - DNA, 20 bp, Artificial Sequence
  chemically synthesized
agttggatcaagctgaattt

SEQ ID NO: 41485 - DNA, 20 bp, Artificial Sequence
  chemically synthesized
attggtttggccctactaag

SEQ ID NO: 41486 - DNA, 20 bp, Artificial Sequence
  chemically synthesized
ggcgggcagatcacgagatc

SEQ ID NO: 41487 - DNA, 20 bp, Artificial Sequence
  chemically synthesized
ttgggaggctgaggcaagag

SEQ ID NO: 41488 - DNA, 20 bp, Artificial Sequence
  chemically synthesized
aactgcttgaacctgtgagg

SEQ ID NO: 41489 - DNA, 20 bp, Artificial Sequence
  chemically synthesized
aaaaaaaaaaaaaaagttat

SEQ ID NO: 41490 - DNA, 20 bp, Artificial Sequence
  chemically synthesized
aaaaaaagttataatagttt

SEQ ID NO: 41491 - DNA, 20 bp, Artificial Sequence
  chemically synthesized
atttgcttggttagctgaaa

SEQ ID NO: 41492 - DNA, 20 bp, Artificial Sequence
  chemically synthesized
tgttagtgagctggaaatgc

SEQ ID NO: 41493 - DNA, 20 bp, Artificial Sequence
  chemically synthesized
taatgtagaggaagtgatcc

SEQ ID NO: 41494 - DNA, 20 bp, Artificial Sequence
  chemically synthesized
ggaagtgatccaaaggctta

SEQ ID NO: 41495 - DNA, 20 bp, Artificial Sequence
  chemically synthesized
tagggagattaggatggtgg

SEQ ID NO: 41496 - DNA, 20 bp, Artificial Sequence
  chemically synthesized
ccagaagatacacccttggc

SEQ ID NO: 41497 - DNA, 20 bp, Artificial Sequence
  chemically synthesized
ccttggccgaagctttgtga

SEQ ID NO: 41498 - DNA, 20 bp, Artificial Sequence
  chemically synthesized
gggaaacctactgtattcct

SEQ ID NO: 41499 - DNA, 20 bp, Artificial Sequence
  chemically synthesized
ggacactggctctgagctga

SEQ ID NO: 41500 - DNA, 20 bp, Artificial Sequence
  chemically synthesized
tgtggttccccagttaaagt

SEQ ID NO: 41501 - DNA, 20 bp, Artificial Sequence
  chemically synthesized
tatggaggttaggtaattaa

SEQ ID NO: 41502 - DNA, 20 bp, Artificial Sequence
  chemically synthesized
tcccatccctggagggactg

SEQ ID NO: 41503 - DNA, 20 bp, Artificial Sequence
  chemically synthesized
ggacttgaaagacgcagggg

SEQ ID NO: 41504 - DNA, 20 bp, Artificial Sequence
  chemically synthesized
gatggatcttggaaaatgat

SEQ ID NO: 41505 - DNA, 20 bp, Artificial Sequence
  chemically synthesized
gaaaatgatggtggattatt

SEQ ID NO: 41506 - DNA, 20 bp, Artificial Sequence
  chemically synthesized
attgcagctgctctaccagt

SEQ ID NO: 41507 - DNA, 20 bp, Artificial Sequence
  chemically synthesized
tgctctaccagttgtggttt

SEQ ID NO: 41508 - DNA, 20 bp, Artificial Sequence
  chemically synthesized
ctggtgcctggtatgcagcc

SEQ ID NO: 41509 - DNA, 20 bp, Artificial Sequence
  chemically synthesized
atgcagccattggcttggca

SEQ ID NO: 41510 - DNA, 20 bp, Artificial Sequence
  chemically synthesized
cctcaggggtgtatcaactc

SEQ ID NO: 41511 - DNA, 20 bp, Artificial Sequence
  chemically synthesized
atcttatttggagagacctt

SEQ ID NO: 41512 - DNA, 20 bp, Artificial Sequence
  chemically synthesized
ccattacattcatgacatta

SEQ ID NO: 41513 - DNA, 20 bp, Artificial Sequence
  chemically synthesized
ctaaggtgaagcataacttg

SEQ ID NO: 41514 - DNA, 20 bp, Artificial Sequence
  chemically synthesized
cacaatgcctggtgggccta

SEQ ID NO: 41515 - DNA, 20 bp, Artificial Sequence
  chemically synthesized
gattttggaggcaacacatt

SEQ ID NO: 41516 - DNA, 20 bp, Artificial Sequence
  chemically synthesized
atcgagtgacctgaaaggct

SEQ ID NO: 41517 - DNA, 20 bp, Artificial Sequence
  chemically synthesized
acatgaccccgcagatccaa

SEQ ID NO: 41518 - DNA, 20 bp, Artificial Sequence
  chemically synthesized
gtgtcagtggcagataggga

SEQ ID NO: 41519 - DNA, 20 bp, Artificial Sequence
  chemically synthesized
gtgaatcacagtggagacct

SEQ ID NO: 41520 - DNA, 20 bp, Artificial Sequence
  chemically synthesized
agacagctattggtctgtta

SEQ ID NO: 41521 - DNA, 20 bp, Artificial Sequence
  chemically synthesized
attgggctttggtggtaact

SEQ ID NO: 41522 - DNA, 20 bp, Artificial Sequence
  chemically synthesized
gaacctgcctatcatgaact

SEQ ID NO: 41523 - DNA, 20 bp, Artificial Sequence
  chemically synthesized
ttgaagtggtgtgtatgtga

SEQ ID NO: 41524 - DNA, 20 bp, Artificial Sequence
  chemically synthesized
tttttcctttatcatgtgac

SEQ ID NO: 41525 - DNA, 20 bp, Artificial Sequence
  chemically synthesized
gttaaccttatgtaataact

SEQ ID NO: 41526 - DNA, 20 bp, Artificial Sequence
  chemically synthesized
ttatgtaataacttttggtt

SEQ ID NO: 41527 - DNA, 20 bp, Artificial Sequence
  chemically synthesized
aacttttggtttggggattg

SEQ ID NO: 41528 - DNA, 20 bp, Artificial Sequence
  chemically synthesized
accttattattgtctttatt

SEQ ID NO: 41529 - DNA, 20 bp, Artificial Sequence
  chemically synthesized
tgtctttatttgaagattat

SEQ ID NO: 41530 - DNA, 20 bp, Artificial Sequence
  chemically synthesized
tgtgatggttaatactgtca

SEQ ID NO: 41531 - DNA, 20 bp, Artificial Sequence
  chemically synthesized
tggttaatactgtcaacttg

SEQ ID NO: 41532 - DNA, 20 bp, Artificial Sequence
  chemically synthesized
gtctgtgagggtgtggcaaa

SEQ ID NO: 41533 - DNA, 22 bp, Artificial Sequence
  chemically synthesized
ccagcccactgactcaaatgtt

SEQ ID NO: 41534 - DNA, 22 bp, Artificial Sequence
  chemically synthesized
actcaaatgttaatctcctttt

SEQ ID NO: 41535 - DNA, 22 bp, Artificial Sequence
  chemically synthesized
aaatgttaatctccttttgcca

SEQ ID NO: 41536 - DNA, 22 bp, Artificial Sequence
  chemically synthesized
atctccttttgccacaccctca

SEQ ID NO: 41537 - DNA, 22 bp, Artificial Sequence
  chemically synthesized
cttttgccacaccctcacagac

SEQ ID NO: 41538 - DNA, 22 bp, Artificial Sequence
  chemically synthesized
ttgccacaccctcacagacata

SEQ ID NO: 41539 - DNA, 22 bp, Artificial Sequence
  chemically synthesized
tgccacaccctcacagacataa

SEQ ID NO: 41540 - DNA, 22 bp, Artificial Sequence
  chemically synthesized
gccacaccctcacagacataac

SEQ ID NO: 41541 - DNA, 22 bp, Artificial Sequence
  chemically synthesized
ccacaccctcacagacataacc

SEQ ID NO: 41542 - DNA, 22 bp, Artificial Sequence
  chemically synthesized
acagacataaccgagattaata

SEQ ID NO: 41543 - DNA, 22 bp, Artificial Sequence
  chemically synthesized
atactttgcatctttcaatcca

SEQ ID NO: 41544 - DNA, 22 bp, Artificial Sequence
  chemically synthesized
tgcatctttcaatccaatcaag

SEQ ID NO: 41545 - DNA, 22 bp, Artificial Sequence
  chemically synthesized
gcatctttcaatccaatcaagt

SEQ ID NO: 41546 - DNA, 22 bp, Artificial Sequence
  chemically synthesized
catctttcaatccaatcaagtt

SEQ ID NO: 41547 - DNA, 22 bp, Artificial Sequence
  chemically synthesized
tcaatccaatcaagttgacagt

SEQ ID NO: 41548 - DNA, 22 bp, Artificial Sequence
  chemically synthesized
caatccaatcaagttgacagta

SEQ ID NO: 41549 - DNA, 22 bp, Artificial Sequence
  chemically synthesized
aatccaatcaagttgacagtat

SEQ ID NO: 41550 - DNA, 22 bp, Artificial Sequence
  chemically synthesized
acagtattaaccatcacaagtc

SEQ ID NO: 41551 - DNA, 22 bp, Artificial Sequence
  chemically synthesized
accatcacaagtccaactcctt

SEQ ID NO: 41552 - DNA, 22 bp, Artificial Sequence
  chemically synthesized
cttgtcaacttgaacccataca

SEQ ID NO: 41553 - DNA, 22 bp, Artificial Sequence
  chemically synthesized
gtcaacttgaacccatacacac

SEQ ID NO: 41554 - DNA, 22 bp, Artificial Sequence
  chemically synthesized
tcaacttgaacccatacacaca

SEQ ID NO: 41555 - DNA, 22 bp, Artificial Sequence
  chemically synthesized
gaacccatacacacatcctgaa

SEQ ID NO: 41556 - DNA, 22 bp, Artificial Sequence
  chemically synthesized
aacccatacacacatcctgaaa

SEQ ID NO: 41557 - DNA, 22 bp, Artificial Sequence
  chemically synthesized
aaatcatacataatcttcaaat

SEQ ID NO: 41558 - DNA, 22 bp, Artificial Sequence
  chemically synthesized
caaataaagacaataataaggt

SEQ ID NO: 41559 - DNA, 22 bp, Artificial Sequence
  chemically synthesized
aaataaagacaataataaggtc

SEQ ID NO: 41560 - DNA, 22 bp, Artificial Sequence
  chemically synthesized
tgcctaatataatacaactatc

SEQ ID NO: 41561 - DNA, 22 bp, Artificial Sequence
  chemically synthesized
atataatacaactatcctcata

SEQ ID NO: 41562 - DNA, 22 bp, Artificial Sequence
  chemically synthesized
tcctcatacaaccagaaacgca

SEQ ID NO: 41563 - DNA, 22 bp, Artificial Sequence
  chemically synthesized
atacaaccagaaacgcaccaat

SEQ ID NO: 41564 - DNA, 22 bp, Artificial Sequence
  chemically synthesized
ttacataaggttaacaatattt

SEQ ID NO: 41565 - DNA, 22 bp, Artificial Sequence
  chemically synthesized
cataaggttaacaatatttaaa

SEQ ID NO: 41566 - DNA, 22 bp, Artificial Sequence
  chemically synthesized
acaatatttaaatgctgatatg

SEQ ID NO: 41567 - DNA, 22 bp, Artificial Sequence
  chemically synthesized
aaatgctgatatgaacaacact

SEQ ID NO: 41568 - DNA, 22 bp, Artificial Sequence
  chemically synthesized
aatgctgatatgaacaacactt

SEQ ID NO: 41569 - DNA, 22 bp, Artificial Sequence
  chemically synthesized
atatgaacaacacttaaatgct

SEQ ID NO: 41570 - DNA, 22 bp, Artificial Sequence
  chemically synthesized
aaatgcttaaatgctgatgtga

SEQ ID NO: 41571 - DNA, 22 bp, Artificial Sequence
  chemically synthesized
aatgcttaaatgctgatgtgaa

SEQ ID NO: 41572 - DNA, 22 bp, Artificial Sequence
  chemically synthesized
aaatgctgatgtgaagtccata

SEQ ID NO: 41573 - DNA, 22 bp, Artificial Sequence
  chemically synthesized
aatgctgatgtgaagtccataa

SEQ ID NO: 41574 - DNA, 22 bp, Artificial Sequence
  chemically synthesized
atgtgaagtccataaatctaag

SEQ ID NO: 41575 - DNA, 22 bp, Artificial Sequence
  chemically synthesized
aggtcacatgataaaggaaaaa

SEQ ID NO: 41576 - DNA, 22 bp, Artificial Sequence
  chemically synthesized
tcttagcacaagtgtacacatg

SEQ ID NO: 41577 - DNA, 22 bp, Artificial Sequence
  chemically synthesized
cttagcacaagtgtacacatgc

SEQ ID NO: 41578 - DNA, 22 bp, Artificial Sequence
  chemically synthesized
ttagcacaagtgtacacatgca

SEQ ID NO: 41579 - DNA, 22 bp, Artificial Sequence
  chemically synthesized
agcacaagtgtacacatgcatt

SEQ ID NO: 41580 - DNA, 22 bp, Artificial Sequence
  chemically synthesized
gcacaagtgtacacatgcattt

SEQ ID NO: 41581 - DNA, 22 bp, Artificial Sequence
  chemically synthesized
agaaagtggatatagtgctgca

SEQ ID NO: 41582 - DNA, 22 bp, Artificial Sequence
  chemically synthesized
gaaagtggatatagtgctgcag

SEQ ID NO: 41583 - DNA, 22 bp, Artificial Sequence
  chemically synthesized
cagctgtccactttcgggtggt

SEQ ID NO: 41584 - DNA, 22 bp, Artificial Sequence
  chemically synthesized
tccactttcgggtggtgcctgc

SEQ ID NO: 41585 - DNA, 22 bp, Artificial Sequence
  chemically synthesized
tcgggtggtgcctgcatatcgt

SEQ ID NO: 41586 - DNA, 22 bp, Artificial Sequence
  chemically synthesized
cgggtggtgcctgcatatcgtg

SEQ ID NO: 41587 - DNA, 22 bp, Artificial Sequence
  chemically synthesized
gggtggtgcctgcatatcgtgc

SEQ ID NO: 41588 - DNA, 22 bp, Artificial Sequence
  chemically synthesized
catatcgtgcagaaccatctat

SEQ ID NO: 41589 - DNA, 22 bp, Artificial Sequence
  chemically synthesized
tgaaccagtccttagtcttccc

SEQ ID NO: 41590 - DNA, 22 bp, Artificial Sequence
  chemically synthesized
agtcttcccttcctctgtcaac

SEQ ID NO: 41591 - DNA, 22 bp, Artificial Sequence
  chemically synthesized
gtcttcccttcctctgtcaact

SEQ ID NO: 41592 - DNA, 22 bp, Artificial Sequence
  chemically synthesized
cccttcctctgtcaactgatca

SEQ ID NO: 41593 - DNA, 22 bp, Artificial Sequence
  chemically synthesized
ccttcctctgtcaactgatcat

SEQ ID NO: 41594 - DNA, 22 bp, Artificial Sequence
  chemically synthesized
cctctgtcaactgatcataggg

SEQ ID NO: 41595 - DNA, 22 bp, Artificial Sequence
  chemically synthesized
ctctgtcaactgatcataggga

SEQ ID NO: 41596 - DNA, 22 bp, Artificial Sequence
  chemically synthesized
tgtcaactgatcatagggaact

SEQ ID NO: 41597 - DNA, 22 bp, Artificial Sequence
  chemically synthesized
tcaactgatcatagggaactcc

SEQ ID NO: 41598 - DNA, 22 bp, Artificial Sequence
  chemically synthesized
atcatagggaactccccatgag

SEQ ID NO: 41599 - DNA, 22 bp, Artificial Sequence
  chemically synthesized
cccatgaggccattggtgcagg

SEQ ID NO: 41600 - DNA, 22 bp, Artificial Sequence
  chemically synthesized
gtgcaggctgggggagggaagg

SEQ ID NO: 41601 - DNA, 22 bp, Artificial Sequence
  chemically synthesized
ggggagggaaggcagggtggca

SEQ ID NO: 41602 - DNA, 22 bp, Artificial Sequence
  chemically synthesized
gagccacttccttatgtaactt

SEQ ID NO: 41603 - DNA, 22 bp, Artificial Sequence
  chemically synthesized
agccacttccttatgtaactta

SEQ ID NO: 41604 - DNA, 22 bp, Artificial Sequence
  chemically synthesized
ccttatgtaacttacttgtgcc

SEQ ID NO: 41605 - DNA, 22 bp, Artificial Sequence
  chemically synthesized
cttatgtaacttacttgtgcct

SEQ ID NO: 41606 - DNA, 22 bp, Artificial Sequence
  chemically synthesized
atgtaacttacttgtgccttca

SEQ ID NO: 41607 - DNA, 22 bp, Artificial Sequence
  chemically synthesized
tgtaacttacttgtgccttcag

SEQ ID NO: 41608 - DNA, 22 bp, Artificial Sequence
  chemically synthesized
acttgtgccttcaggacctgct

SEQ ID NO: 41609 - DNA, 22 bp, Artificial Sequence
  chemically synthesized
cttgtgccttcaggacctgctc

SEQ ID NO: 41610 - DNA, 22 bp, Artificial Sequence
  chemically synthesized
gtgccttcaggacctgctcaag

SEQ ID NO: 41611 - DNA, 22 bp, Artificial Sequence
  chemically synthesized
tgccttcaggacctgctcaagc

SEQ ID NO: 41612 - DNA, 22 bp, Artificial Sequence
  chemically synthesized
caggacctgctcaagcccgatc

SEQ ID NO: 41613 - DNA, 22 bp, Artificial Sequence
  chemically synthesized
aggacctgctcaagcccgatca

SEQ ID NO: 41614 - DNA, 22 bp, Artificial Sequence
  chemically synthesized
ctcaagcccgatcacatacaca

SEQ ID NO: 41615 - DNA, 22 bp, Artificial Sequence
  chemically synthesized
aagcccgatcacatacacacca

SEQ ID NO: 41616 - DNA, 22 bp, Artificial Sequence
  chemically synthesized
caatttgatgatgaaatgccgc

SEQ ID NO: 41617 - DNA, 22 bp, Artificial Sequence
  chemically synthesized
aatttgatgatgaaatgccgct

SEQ ID NO: 41618 - DNA, 22 bp, Artificial Sequence
  chemically synthesized
gatgatgaaatgccgctgtgct

SEQ ID NO: 41619 - DNA, 22 bp, Artificial Sequence
  chemically synthesized
atgatgaaatgccgctgtgctg

SEQ ID NO: 41620 - DNA, 22 bp, Artificial Sequence
  chemically synthesized
tgctgacccacttcatggctag

SEQ ID NO: 41621 - DNA, 22 bp, Artificial Sequence
  chemically synthesized
acccacttcatggctagatggg

SEQ ID NO: 41622 - DNA, 22 bp, Artificial Sequence
  chemically synthesized
catggctagatgggtcagaaag

SEQ ID NO: 41623 - DNA, 22 bp, Artificial Sequence
  chemically synthesized
atggctagatgggtcagaaagc

SEQ ID NO: 41624 - DNA, 22 bp, Artificial Sequence
  chemically synthesized
gatgggtcagaaagcaaccagt

SEQ ID NO: 41625 - DNA, 22 bp, Artificial Sequence
  chemically synthesized
atgataggcaggttcaggtagc

SEQ ID NO: 41626 - DNA, 22 bp, Artificial Sequence
  chemically synthesized
aggtagcatggtgactttatga

SEQ ID NO: 41627 - DNA, 22 bp, Artificial Sequence
  chemically synthesized
tatgacccacagtcaaacgttc

SEQ ID NO: 41628 - DNA, 22 bp, Artificial Sequence
  chemically synthesized
atgacccacagtcaaacgttca

SEQ ID NO: 41629 - DNA, 22 bp, Artificial Sequence
  chemically synthesized
tgacccacagtcaaacgttcag

SEQ ID NO: 41630 - DNA, 22 bp, Artificial Sequence
  chemically synthesized
agttaccaccaaagcccaataa

SEQ ID NO: 41631 - DNA, 22 bp, Artificial Sequence
  chemically synthesized
ccaccaaagcccaataacagac

SEQ ID NO: 41632 - DNA, 22 bp, Artificial Sequence
  chemically synthesized
tctctcaaaaggagagtagtta

SEQ ID NO: 41633 - DNA, 22 bp, Artificial Sequence
  chemically synthesized
tcaaaaggagagtagttatctg

SEQ ID NO: 41634 - DNA, 22 bp, Artificial Sequence
  chemically synthesized
aaaaggagagtagttatctgca

SEQ ID NO: 41635 - DNA, 22 bp, Artificial Sequence
  chemically synthesized
tctgcagaagtggcagggcctt

SEQ ID NO: 41636 - DNA, 22 bp, Artificial Sequence
  chemically synthesized
cagaagtggcagggccttgctc

SEQ ID NO: 41637 - DNA, 22 bp, Artificial Sequence
  chemically synthesized
gctccaaaatcctagaggtctc

SEQ ID NO: 41638 - DNA, 22 bp, Artificial Sequence
  chemically synthesized
ctccaaaatcctagaggtctcc

SEQ ID NO: 41639 - DNA, 22 bp, Artificial Sequence
  chemically synthesized
caaaatcctagaggtctccact

SEQ ID NO: 41640 - DNA, 22 bp, Artificial Sequence
  chemically synthesized
gaggtctccactgtgattcacc

SEQ ID NO: 41641 - DNA, 22 bp, Artificial Sequence
  chemically synthesized
cactgtgattcacctatggggg

SEQ ID NO: 41642 - DNA, 22 bp, Artificial Sequence
  chemically synthesized
tgattcacctatgggggcctgc

SEQ ID NO: 41643 - DNA, 22 bp, Artificial Sequence
  chemically synthesized
acctatgggggcctgccaaagg

SEQ ID NO: 41644 - DNA, 22 bp, Artificial Sequence
  chemically synthesized
tgggggcctgccaaaggctcca

SEQ ID NO: 41645 - DNA, 22 bp, Artificial Sequence
  chemically synthesized
ccaaaggctccaaacagcatcc

SEQ ID NO: 41646 - DNA, 22 bp, Artificial Sequence
  chemically synthesized
caaacagcatccctatctgcca

SEQ ID NO: 41647 - DNA, 22 bp, Artificial Sequence
  chemically synthesized
tctgccactgacacctcaagca

SEQ ID NO: 41648 - DNA, 22 bp, Artificial Sequence
  chemically synthesized
ccactgacacctcaagcaccat

SEQ ID NO: 41649 - DNA, 22 bp, Artificial Sequence
  chemically synthesized
acacctcaagcaccattggatc

SEQ ID NO: 41650 - DNA, 22 bp, Artificial Sequence
  chemically synthesized
aagcaccattggatctgcgggg

SEQ ID NO: 41651 - DNA, 22 bp, Artificial Sequence
  chemically synthesized
gatctgcggggtcatgtggccc

SEQ ID NO: 41652 - DNA, 22 bp, Artificial Sequence
  chemically synthesized
cggggtcatgtggcccaaatgg

SEQ ID NO: 41653 - DNA, 22 bp, Artificial Sequence
  chemically synthesized
tcacagcagcctggacctgttt

SEQ ID NO: 41654 - DNA, 22 bp, Artificial Sequence
  chemically synthesized
cacagcagcctggacctgtttc

SEQ ID NO: 41655 - DNA, 22 bp, Artificial Sequence
  chemically synthesized
acagcagcctggacctgtttca

SEQ ID NO: 41656 - DNA, 22 bp, Artificial Sequence
  chemically synthesized
gacctgtttcagagccttcttt

SEQ ID NO: 41657 - DNA, 22 bp, Artificial Sequence
  chemically synthesized
tttcagagccttcttttgttct

SEQ ID NO: 41658 - DNA, 22 bp, Artificial Sequence
  chemically synthesized
cagagccttcttttgttctaga

SEQ ID NO: 41659 - DNA, 22 bp, Artificial Sequence
  chemically synthesized
agagccttcttttgttctagac

SEQ ID NO: 41660 - DNA, 22 bp, Artificial Sequence
  chemically synthesized
cttttgttctagactgcactta

SEQ ID NO: 41661 - DNA, 22 bp, Artificial Sequence
  chemically synthesized
ttttgttctagactgcacttaa

SEQ ID NO: 41662 - DNA, 22 bp, Artificial Sequence
  chemically synthesized
ttgttctagactgcacttaaat

SEQ ID NO: 41663 - DNA, 22 bp, Artificial Sequence
  chemically synthesized
tgttctagactgcacttaaatc

SEQ ID NO: 41664 - DNA, 22 bp, Artificial Sequence
  chemically synthesized
gttctagactgcacttaaatct

SEQ ID NO: 41665 - DNA, 22 bp, Artificial Sequence
  chemically synthesized
ttctagactgcacttaaatctg

SEQ ID NO: 41666 - DNA, 22 bp, Artificial Sequence
  chemically synthesized
tagactgcacttaaatctggca

SEQ ID NO: 41667 - DNA, 22 bp, Artificial Sequence
  chemically synthesized
gactgcacttaaatctggcagc

SEQ ID NO: 41668 - DNA, 22 bp, Artificial Sequence
  chemically synthesized
cacttaaatctggcagcctttc

SEQ ID NO: 41669 - DNA, 22 bp, Artificial Sequence
  chemically synthesized
aaatctggcagcctttcaggtc

SEQ ID NO: 41670 - DNA, 22 bp, Artificial Sequence
  chemically synthesized
aatctggcagcctttcaggtca

SEQ ID NO: 41671 - DNA, 22 bp, Artificial Sequence
  chemically synthesized
gcagcctttcaggtcactcgat

SEQ ID NO: 41672 - DNA, 22 bp, Artificial Sequence
  chemically synthesized
tcaggtcactcgataaatgggc

SEQ ID NO: 41673 - DNA, 22 bp, Artificial Sequence
  chemically synthesized
caggtcactcgataaatgggcc

SEQ ID NO: 41674 - DNA, 22 bp, Artificial Sequence
  chemically synthesized
aggtcactcgataaatgggcca

SEQ ID NO: 41675 - DNA, 22 bp, Artificial Sequence
  chemically synthesized
gataaatgggccagagtaacac

SEQ ID NO: 41676 - DNA, 22 bp, Artificial Sequence
  chemically synthesized
cctccaaaatccaaataggccc

SEQ ID NO: 41677 - DNA, 22 bp, Artificial Sequence
  chemically synthesized
caaaatccaaataggcccacca

SEQ ID NO: 41678 - DNA, 22 bp, Artificial Sequence
  chemically synthesized
tgcctctttcttggttgtaaga

SEQ ID NO: 41679 - DNA, 22 bp, Artificial Sequence
  chemically synthesized
tttcttggttgtaagaggggcc

SEQ ID NO: 41680 - DNA, 22 bp, Artificial Sequence
  chemically synthesized
tcttggttgtaagaggggccaa

SEQ ID NO: 41681 - DNA, 22 bp, Artificial Sequence
  chemically synthesized
cttggttgtaagaggggccaaa

SEQ ID NO: 41682 - DNA, 22 bp, Artificial Sequence
  chemically synthesized
ttggttgtaagaggggccaaac

SEQ ID NO: 41683 - DNA, 22 bp, Artificial Sequence
  chemically synthesized
ggttgtaagaggggccaaacgc

SEQ ID NO: 41684 - DNA, 22 bp, Artificial Sequence
  chemically synthesized
gttgtaagaggggccaaacgca

SEQ ID NO: 41685 - DNA, 22 bp, Artificial Sequence
  chemically synthesized
taagaggggccaaacgcagcaa

SEQ ID NO: 41686 - DNA, 22 bp, Artificial Sequence
  chemically synthesized
tgcttcaccttagaaggaatat

SEQ ID NO: 41687 - DNA, 22 bp, Artificial Sequence
  chemically synthesized
caccttagaaggaatatctcca

SEQ ID NO: 41688 - DNA, 22 bp, Artificial Sequence
  chemically synthesized
accttagaaggaatatctccat

SEQ ID NO: 41689 - DNA, 22 bp, Artificial Sequence
  chemically synthesized
agaaggaatatctccataggtc

SEQ ID NO: 41690 - DNA, 22 bp, Artificial Sequence
  chemically synthesized
gaaggaatatctccataggtct

SEQ ID NO: 41691 - DNA, 22 bp, Artificial Sequence
  chemically synthesized
cataggtctcatgccactggaa

SEQ ID NO: 41692 - DNA, 22 bp, Artificial Sequence
  chemically synthesized
atgccactggaaccctagaaat

SEQ ID NO: 41693 - DNA, 22 bp, Artificial Sequence
  chemically synthesized
gaaccctagaaattttaccgag

SEQ ID NO: 41694 - DNA, 22 bp, Artificial Sequence
  chemically synthesized
gaaattttaccgaggtagaaag

SEQ ID NO: 41695 - DNA, 22 bp, Artificial Sequence
  chemically synthesized
taccgaggtagaaagtccctaa

SEQ ID NO: 41696 - DNA, 22 bp, Artificial Sequence
  chemically synthesized
accgaggtagaaagtccctaaa

SEQ ID NO: 41697 - DNA, 22 bp, Artificial Sequence
  chemically synthesized
ccgaggtagaaagtccctaaat

SEQ ID NO: 41698 - DNA, 22 bp, Artificial Sequence
  chemically synthesized
aattttagctggatttatttcc

SEQ ID NO: 41699 - DNA, 22 bp, Artificial Sequence
  chemically synthesized
tagctggatttatttcccatcc

SEQ ID NO: 41700 - DNA, 22 bp, Artificial Sequence
  chemically synthesized
agctggatttatttcccatcct

SEQ ID NO: 41701 - DNA, 22 bp, Artificial Sequence
  chemically synthesized
gctggatttatttcccatcctc

SEQ ID NO: 41702 - DNA, 22 bp, Artificial Sequence
  chemically synthesized
gatttatttcccatcctctggc

SEQ ID NO: 41703 - DNA, 22 bp, Artificial Sequence
  chemically synthesized
atttcccatcctctggcataca

SEQ ID NO: 41704 - DNA, 22 bp, Artificial Sequence
  chemically synthesized
tttcccatcctctggcatacaa

SEQ ID NO: 41705 - DNA, 22 bp, Artificial Sequence
  chemically synthesized
cccatcctctggcatacaaatg

SEQ ID NO: 41706 - DNA, 22 bp, Artificial Sequence
  chemically synthesized
ccatcctctggcatacaaatgt

SEQ ID NO: 41707 - DNA, 22 bp, Artificial Sequence
  chemically synthesized
tggcatacaaatgtctcaccaa

SEQ ID NO: 41708 - DNA, 22 bp, Artificial Sequence
  chemically synthesized
gcatacaaatgtctcaccaata

SEQ ID NO: 41709 - DNA, 22 bp, Artificial Sequence
  chemically synthesized
accaataagttcagtgtgtttg

SEQ ID NO: 41710 - DNA, 22 bp, Artificial Sequence
  chemically synthesized
agtgtgtttgctacttcttgct

SEQ ID NO: 41711 - DNA, 22 bp, Artificial Sequence
  chemically synthesized
gctacttcttgctcactgtatc

SEQ ID NO: 41712 - DNA, 22 bp, Artificial Sequence
  chemically synthesized
ctacttcttgctcactgtatcc

SEQ ID NO: 41713 - DNA, 22 bp, Artificial Sequence
  chemically synthesized
cttcttgctcactgtatccaat

SEQ ID NO: 41714 - DNA, 22 bp, Artificial Sequence
  chemically synthesized
cttgctcactgtatccaatcat

SEQ ID NO: 41715 - DNA, 22 bp, Artificial Sequence
  chemically synthesized
ttgctcactgtatccaatcatc

SEQ ID NO: 41716 - DNA, 22 bp, Artificial Sequence
  chemically synthesized
gctcactgtatccaatcatcat

SEQ ID NO: 41717 - DNA, 22 bp, Artificial Sequence
  chemically synthesized
ctcactgtatccaatcatcata

SEQ ID NO: 41718 - DNA, 22 bp, Artificial Sequence
  chemically synthesized
actgtatccaatcatcataatg

SEQ ID NO: 41719 - DNA, 22 bp, Artificial Sequence
  chemically synthesized
tatccaatcatcataatgtcat

SEQ ID NO: 41720 - DNA, 22 bp, Artificial Sequence
  chemically synthesized
tatctcgtggaagtgaaaagcg

SEQ ID NO: 41721 - DNA, 22 bp, Artificial Sequence
  chemically synthesized
gtggaagtgaaaagcgagcaag

SEQ ID NO: 41722 - DNA, 22 bp, Artificial Sequence
  chemically synthesized
tccaaataagattatgacacaa

SEQ ID NO: 41723 - DNA, 22 bp, Artificial Sequence
  chemically synthesized
caaataagattatgacacaaag

SEQ ID NO: 41724 - DNA, 22 bp, Artificial Sequence
  chemically synthesized
tgacacaaagctggagagttga

SEQ ID NO: 41725 - DNA, 22 bp, Artificial Sequence
  chemically synthesized
gagagttgatacacccctgagg

SEQ ID NO: 41726 - DNA, 22 bp, Artificial Sequence
  chemically synthesized
atacacccctgaggtagggtgg

SEQ ID NO: 41727 - DNA, 22 bp, Artificial Sequence
  chemically synthesized
aggtagggtggtaaaggtataa

SEQ ID NO: 41728 - DNA, 22 bp, Artificial Sequence
  chemically synthesized
gccttgtcagctgaaggcaaat

SEQ ID NO: 41729 - DNA, 22 bp, Artificial Sequence
  chemically synthesized
gtcagctgaaggcaaattgctt

SEQ ID NO: 41730 - DNA, 22 bp, Artificial Sequence
  chemically synthesized
tcagctgaaggcaaattgcttc

SEQ ID NO: 41731 - DNA, 22 bp, Artificial Sequence
  chemically synthesized
aaggcaaattgcttctggtggg

SEQ ID NO: 41732 - DNA, 22 bp, Artificial Sequence
  chemically synthesized
cttctggtgggtcttatggaca

SEQ ID NO: 41733 - DNA, 22 bp, Artificial Sequence
  chemically synthesized
ctggtgggtcttatggacagga

SEQ ID NO: 41734 - DNA, 22 bp, Artificial Sequence
  chemically synthesized
tggtgggtcttatggacaggaa

SEQ ID NO: 41735 - DNA, 22 bp, Artificial Sequence
  chemically synthesized
gtgggtcttatggacaggaatg

SEQ ID NO: 41736 - DNA, 22 bp, Artificial Sequence
  chemically synthesized
atggacaggaatggagaaaaag

SEQ ID NO: 41737 - DNA, 22 bp, Artificial Sequence
  chemically synthesized
tggacaggaatggagaaaaagc

SEQ ID NO: 41738 - DNA, 22 bp, Artificial Sequence
  chemically synthesized
gccaagccaatggctgcatacc

SEQ ID NO: 41739 - DNA, 22 bp, Artificial Sequence
  chemically synthesized
ccaagccaatggctgcatacca

SEQ ID NO: 41740 - DNA, 22 bp, Artificial Sequence
  chemically synthesized
cataccaggcaccaggagatgt

SEQ ID NO: 41741 - DNA, 22 bp, Artificial Sequence
  chemically synthesized
atttgctcaagcaacaaaacca

SEQ ID NO: 41742 - DNA, 22 bp, Artificial Sequence
  chemically synthesized
gctcaagcaacaaaaccacaac

SEQ ID NO: 41743 - DNA, 22 bp, Artificial Sequence
  chemically synthesized
ctcaagcaacaaaaccacaact

SEQ ID NO: 41744 - DNA, 22 bp, Artificial Sequence
  chemically synthesized
aagcaacaaaaccacaactggt

SEQ ID NO: 41745 - DNA, 22 bp, Artificial Sequence
  chemically synthesized
gtagagcagctgcaattggagt

SEQ ID NO: 41746 - DNA, 22 bp, Artificial Sequence
  chemically synthesized
caattggagtcaccacttggtt

SEQ ID NO: 41747 - DNA, 22 bp, Artificial Sequence
  chemically synthesized
gagtcaccacttggttaagctt

SEQ ID NO: 41748 - DNA, 22 bp, Artificial Sequence
  chemically synthesized
ggttaagcttaaaataatccac

SEQ ID NO: 41749 - DNA, 22 bp, Artificial Sequence
  chemically synthesized
gttaagcttaaaataatccacc

SEQ ID NO: 41750 - DNA, 22 bp, Artificial Sequence
  chemically synthesized
agcttaaaataatccaccatca

SEQ ID NO: 41751 - DNA, 22 bp, Artificial Sequence
  chemically synthesized
aaaataatccaccatcattttc

SEQ ID NO: 41752 - DNA, 22 bp, Artificial Sequence
  chemically synthesized
aaataatccaccatcattttcc

SEQ ID NO: 41753 - DNA, 22 bp, Artificial Sequence
  chemically synthesized
tccaagatccatctgtcctctg

SEQ ID NO: 41754 - DNA, 22 bp, Artificial Sequence
  chemically synthesized
ccaagatccatctgtcctctgc

SEQ ID NO: 41755 - DNA, 22 bp, Artificial Sequence
  chemically synthesized
caagatccatctgtcctctgca

SEQ ID NO: 41756 - DNA, 22 bp, Artificial Sequence
  chemically synthesized
tcctctgcacaggtcaaatggg

SEQ ID NO: 41757 - DNA, 22 bp, Artificial Sequence
  chemically synthesized
tgcacaggtcaaatgggagagt

SEQ ID NO: 41758 - DNA, 22 bp, Artificial Sequence
  chemically synthesized
cacaggtcaaatgggagagttg

SEQ ID NO: 41759 - DNA, 22 bp, Artificial Sequence
  chemically synthesized
aacagggatgtggtgggaatca

SEQ ID NO: 41760 - DNA, 22 bp, Artificial Sequence
  chemically synthesized
cgtctttcaagtccttgatggt

SEQ ID NO: 41761 - DNA, 22 bp, Artificial Sequence
  chemically synthesized
tcaagtccttgatggtgacact

SEQ ID NO: 41762 - DNA, 22 bp, Artificial Sequence
  chemically synthesized
caagtccttgatggtgacacta

SEQ ID NO: 41763 - DNA, 22 bp, Artificial Sequence
  chemically synthesized
aagtccttgatggtgacactaa

SEQ ID NO: 41764 - DNA, 22 bp, Artificial Sequence
  chemically synthesized
gatggtgacactaatcacttca

SEQ ID NO: 41765 - DNA, 22 bp, Artificial Sequence
  chemically synthesized
atggtgacactaatcacttcag

SEQ ID NO: 41766 - DNA, 22 bp, Artificial Sequence
  chemically synthesized
atcacttcagtccctccaggga

SEQ ID NO: 41767 - DNA, 22 bp, Artificial Sequence
  chemically synthesized
cagtccctccagggatgggata

SEQ ID NO: 41768 - DNA, 22 bp, Artificial Sequence
  chemically synthesized
agtccctccagggatgggatat

SEQ ID NO: 41769 - DNA, 22 bp, Artificial Sequence
  chemically synthesized
cagggatgggatattgtttttg

SEQ ID NO: 41770 - DNA, 22 bp, Artificial Sequence
  chemically synthesized
tttttgatttttttatttttct

SEQ ID NO: 41771 - DNA, 22 bp, Artificial Sequence
  chemically synthesized
ttgatttttttatttttctagg

SEQ ID NO: 41772 - DNA, 22 bp, Artificial Sequence
  chemically synthesized
tgatttttttatttttctaggt

SEQ ID NO: 41773 - DNA, 22 bp, Artificial Sequence
  chemically synthesized
gatttttttatttttctaggta

SEQ ID NO: 41774 - DNA, 22 bp, Artificial Sequence
  chemically synthesized
atttttttatttttctaggtag

SEQ ID NO: 41775 - DNA, 22 bp, Artificial Sequence
  chemically synthesized
ttttatttttctaggtagagac

SEQ ID NO: 41776 - DNA, 22 bp, Artificial Sequence
  chemically synthesized
tttatttttctaggtagagaca

SEQ ID NO: 41777 - DNA, 22 bp, Artificial Sequence
  chemically synthesized
ttatttttctaggtagagacag

SEQ ID NO: 41778 - DNA, 22 bp, Artificial Sequence
  chemically synthesized
tatttttctaggtagagacagc

SEQ ID NO: 41779 - DNA, 22 bp, Artificial Sequence
  chemically synthesized
atttttctaggtagagacagct

SEQ ID NO: 41780 - DNA, 22 bp, Artificial Sequence
  chemically synthesized
tttttctaggtagagacagctc

SEQ ID NO: 41781 - DNA, 22 bp, Artificial Sequence
  chemically synthesized
ttctaggtagagacagctctaa

SEQ ID NO: 41782 - DNA, 22 bp, Artificial Sequence
  chemically synthesized
tctaggtagagacagctctaat

SEQ ID NO: 41783 - DNA, 22 bp, Artificial Sequence
  chemically synthesized
ctaggtagagacagctctaatg

SEQ ID NO: 41784 - DNA, 22 bp, Artificial Sequence
  chemically synthesized
taggtagagacagctctaatgg

SEQ ID NO: 41785 - DNA, 22 bp, Artificial Sequence
  chemically synthesized
ggtagagacagctctaatggct

SEQ ID NO: 41786 - DNA, 22 bp, Artificial Sequence
  chemically synthesized
taatggcttctgtttggccttt

SEQ ID NO: 41787 - DNA, 22 bp, Artificial Sequence
  chemically synthesized
atggcttctgtttggcctttcc

SEQ ID NO: 41788 - DNA, 22 bp, Artificial Sequence
  chemically synthesized
ctgtttggcctttcccaccata

SEQ ID NO: 41789 - DNA, 22 bp, Artificial Sequence
  chemically synthesized
tgtttggcctttcccaccataa

SEQ ID NO: 41790 - DNA, 22 bp, Artificial Sequence
  chemically synthesized
tttggcctttcccaccataata

SEQ ID NO: 41791 - DNA, 22 bp, Artificial Sequence
  chemically synthesized
ggcctttcccaccataatagcc

SEQ ID NO: 41792 - DNA, 22 bp, Artificial Sequence
  chemically synthesized
gcctttcccaccataatagccc

SEQ ID NO: 41793 - DNA, 22 bp, Artificial Sequence
  chemically synthesized
tcccaccataatagccctcatc

SEQ ID NO: 41794 - DNA, 22 bp, Artificial Sequence
  chemically synthesized
cccaccataatagccctcatcc

SEQ ID NO: 41795 - DNA, 22 bp, Artificial Sequence
  chemically synthesized
ccaccataatagccctcatcct

SEQ ID NO: 41796 - DNA, 22 bp, Artificial Sequence
  chemically synthesized
atcctaccagtcagggagccaa

SEQ ID NO: 41797 - DNA, 22 bp, Artificial Sequence
  chemically synthesized
ccagtcagggagccaatgtggc

SEQ ID NO: 41798 - DNA, 22 bp, Artificial Sequence
  chemically synthesized
ctgccagctaataagtatgtct

SEQ ID NO: 41799 - DNA, 22 bp, Artificial Sequence
  chemically synthesized
tgccagctaataagtatgtcta

SEQ ID NO: 41800 - DNA, 22 bp, Artificial Sequence
  chemically synthesized
ccagctaataagtatgtctata

SEQ ID NO: 41801 - DNA, 22 bp, Artificial Sequence
  chemically synthesized
ataagtatgtctatacaaatta

SEQ ID NO: 41802 - DNA, 22 bp, Artificial Sequence
  chemically synthesized
tacaaattatgcattttggcac

SEQ ID NO: 41803 - DNA, 22 bp, Artificial Sequence
  chemically synthesized
tgcattttggcactgggaaaat

SEQ ID NO: 41804 - DNA, 22 bp, Artificial Sequence
  chemically synthesized
tggcactgggaaaatgaccaga

SEQ ID NO: 41805 - DNA, 22 bp, Artificial Sequence
  chemically synthesized
ggcactgggaaaatgaccagag

SEQ ID NO: 41806 - DNA, 22 bp, Artificial Sequence
  chemically synthesized
gcactgggaaaatgaccagagg

SEQ ID NO: 41807 - DNA, 22 bp, Artificial Sequence
  chemically synthesized
ggaaaatgaccagaggataagt

SEQ ID NO: 41808 - DNA, 22 bp, Artificial Sequence
  chemically synthesized
gaaccactgtaagtcagaaatg

SEQ ID NO: 41809 - DNA, 22 bp, Artificial Sequence
  chemically synthesized
taagtcagaaatgagctaaaac

SEQ ID NO: 41810 - DNA, 22 bp, Artificial Sequence
  chemically synthesized
aaactccattaattacctaacc

SEQ ID NO: 41811 - DNA, 22 bp, Artificial Sequence
  chemically synthesized
cattaattacctaacctccata

SEQ ID NO: 41812 - DNA, 22 bp, Artificial Sequence
  chemically synthesized
attacctaacctccataagccc

SEQ ID NO: 41813 - DNA, 22 bp, Artificial Sequence
  chemically synthesized
cctaacctccataagcccctac

SEQ ID NO: 41814 - DNA, 22 bp, Artificial Sequence
  chemically synthesized
acctccataagcccctacttta

SEQ ID NO: 41815 - DNA, 22 bp, Artificial Sequence
  chemically synthesized
cataagcccctactttaactgg

SEQ ID NO: 41816 - DNA, 22 bp, Artificial Sequence
  chemically synthesized
ctttaactggggaaccacaata

SEQ ID NO: 41817 - DNA, 22 bp, Artificial Sequence
  chemically synthesized
taactggggaaccacaataacg

SEQ ID NO: 41818 - DNA, 22 bp, Artificial Sequence
  chemically synthesized
aactggggaaccacaataacgt

SEQ ID NO: 41819 - DNA, 22 bp, Artificial Sequence
  chemically synthesized
actggggaaccacaataacgtt

SEQ ID NO: 41820 - DNA, 22 bp, Artificial Sequence
  chemically synthesized
gggaaccacaataacgttttgg

SEQ ID NO: 41821 - DNA, 22 bp, Artificial Sequence
  chemically synthesized
tgggtaccctggaatcaacgtc

SEQ ID NO: 41822 - DNA, 22 bp, Artificial Sequence
  chemically synthesized
gggtaccctggaatcaacgtca

SEQ ID NO: 41823 - DNA, 22 bp, Artificial Sequence
  chemically synthesized
ggtaccctggaatcaacgtcag

SEQ ID NO: 41824 - DNA, 22 bp, Artificial Sequence
  chemically synthesized
gaatcaacgtcagctcagagcc

SEQ ID NO: 41825 - DNA, 22 bp, Artificial Sequence
  chemically synthesized
agagccagtgtccagtactttc

SEQ ID NO: 41826 - DNA, 22 bp, Artificial Sequence
  chemically synthesized
tctgaaatgtctcattacttcc

SEQ ID NO: 41827 - DNA, 22 bp, Artificial Sequence
  chemically synthesized
ctgaaatgtctcattacttccc

SEQ ID NO: 41828 - DNA, 22 bp, Artificial Sequence
  chemically synthesized
tgaaatgtctcattacttccct

SEQ ID NO: 41829 - DNA, 22 bp, Artificial Sequence
  chemically synthesized
aaatgtctcattacttcccttt

SEQ ID NO: 41830 - DNA, 22 bp, Artificial Sequence
  chemically synthesized
attacttccctttctccagtac

SEQ ID NO: 41831 - DNA, 22 bp, Artificial Sequence
  chemically synthesized
cttccctttctccagtacacac

SEQ ID NO: 41832 - DNA, 22 bp, Artificial Sequence
  chemically synthesized
ccctttctccagtacacacagt

SEQ ID NO: 41833 - DNA, 22 bp, Artificial Sequence
  chemically synthesized
cctttctccagtacacacagtt

SEQ ID NO: 41834 - DNA, 22 bp, Artificial Sequence
  chemically synthesized
tctccagtacacacagttaccc

SEQ ID NO: 41835 - DNA, 22 bp, Artificial Sequence
  chemically synthesized
ctccagtacacacagttaccct

SEQ ID NO: 41836 - DNA, 22 bp, Artificial Sequence
  chemically synthesized
tccagtacacacagttaccctg

SEQ ID NO: 41837 - DNA, 22 bp, Artificial Sequence
  chemically synthesized
cagtacacacagttaccctggt

SEQ ID NO: 41838 - DNA, 22 bp, Artificial Sequence
  chemically synthesized
ccctggtaaaaggccagaggtc

SEQ ID NO: 41839 - DNA, 22 bp, Artificial Sequence
  chemically synthesized
gtaaaaggccagaggtctcctt

SEQ ID NO: 41840 - DNA, 22 bp, Artificial Sequence
  chemically synthesized
cttagggaaggatgggagaaag

SEQ ID NO: 41841 - DNA, 22 bp, Artificial Sequence
  chemically synthesized
agggaaggatgggagaaagagt

SEQ ID NO: 41842 - DNA, 22 bp, Artificial Sequence
  chemically synthesized
gggaaggatgggagaaagagta

SEQ ID NO: 41843 - DNA, 22 bp, Artificial Sequence
  chemically synthesized
tcagtagcctagtggtgtcctt

SEQ ID NO: 41844 - DNA, 22 bp, Artificial Sequence
  chemically synthesized
gtggtgtccttcctcaagggga

SEQ ID NO: 41845 - DNA, 22 bp, Artificial Sequence
  chemically synthesized
cctcaaggggatccagcctccc

SEQ ID NO: 41846 - DNA, 22 bp, Artificial Sequence
  chemically synthesized
ctcaaggggatccagcctcccc

SEQ ID NO: 41847 - DNA, 22 bp, Artificial Sequence
  chemically synthesized
aaggggatccagcctccccttc

SEQ ID NO: 41848 - DNA, 22 bp, Artificial Sequence
  chemically synthesized
cccttcattcagtgggttctgg

SEQ ID NO: 41849 - DNA, 22 bp, Artificial Sequence
  chemically synthesized
cattcagtgggttctggaactg

SEQ ID NO: 41850 - DNA, 22 bp, Artificial Sequence
  chemically synthesized
attcagtgggttctggaactgt

SEQ ID NO: 41851 - DNA, 22 bp, Artificial Sequence
  chemically synthesized
agtgggttctggaactgtaaca

SEQ ID NO: 41852 - DNA, 22 bp, Artificial Sequence
  chemically synthesized
tggaactgtaacaggttcgagt

SEQ ID NO: 41853 - DNA, 22 bp, Artificial Sequence
  chemically synthesized
gaactgtaacaggttcgagtct

SEQ ID NO: 41854 - DNA, 22 bp, Artificial Sequence
  chemically synthesized
taacaggttcgagtctggaaat

SEQ ID NO: 41855 - DNA, 22 bp, Artificial Sequence
  chemically synthesized
gagtctggaaattgattgaggg

SEQ ID NO: 41856 - DNA, 22 bp, Artificial Sequence
  chemically synthesized
gaaattgattgagggcccatga

SEQ ID NO: 41857 - DNA, 22 bp, Artificial Sequence
  chemically synthesized
attgagggcccatgattctctg

SEQ ID NO: 41858 - DNA, 22 bp, Artificial Sequence
  chemically synthesized
agggcccatgattctctgtttt

SEQ ID NO: 41859 - DNA, 22 bp, Artificial Sequence
  chemically synthesized
tctgtttttataattcagatta

SEQ ID NO: 41860 - DNA, 22 bp, Artificial Sequence
  chemically synthesized
tgtttttataattcagattagt

SEQ ID NO: 41861 - DNA, 22 bp, Artificial Sequence
  chemically synthesized
tttttataattcagattagtct

SEQ ID NO: 41862 - DNA, 22 bp, Artificial Sequence
  chemically synthesized
ttataattcagattagtcttta

SEQ ID NO: 41863 - DNA, 22 bp, Artificial Sequence
  chemically synthesized
tataattcagattagtctttag

SEQ ID NO: 41864 - DNA, 22 bp, Artificial Sequence
  chemically synthesized
ataattcagattagtctttagt

SEQ ID NO: 41865 - DNA, 22 bp, Artificial Sequence
  chemically synthesized
taattcagattagtctttagtc

SEQ ID NO: 41866 - DNA, 22 bp, Artificial Sequence
  chemically synthesized
agattagtctttagtccattct

SEQ ID NO: 41867 - DNA, 22 bp, Artificial Sequence
  chemically synthesized
gtctttagtccattctacctgg

SEQ ID NO: 41868 - DNA, 22 bp, Artificial Sequence
  chemically synthesized
tagtccattctacctggcagtt

SEQ ID NO: 41869 - DNA, 22 bp, Artificial Sequence
  chemically synthesized
agtccattctacctggcagttt

SEQ ID NO: 41870 - DNA, 22 bp, Artificial Sequence
  chemically synthesized
gtccattctacctggcagtttt

SEQ ID NO: 41871 - DNA, 22 bp, Artificial Sequence
  chemically synthesized
tacctggcagttttttgtttat

SEQ ID NO: 41872 - DNA, 22 bp, Artificial Sequence
  chemically synthesized
cctggcagttttttgtttatat

SEQ ID NO: 41873 - DNA, 22 bp, Artificial Sequence
  chemically synthesized
gcagttttttgtttatataaat

SEQ ID NO: 41874 - DNA, 22 bp, Artificial Sequence
  chemically synthesized
tttgtttatataaatcaagtag

SEQ ID NO: 41875 - DNA, 22 bp, Artificial Sequence
  chemically synthesized
ttgtttatataaatcaagtagg

SEQ ID NO: 41876 - DNA, 22 bp, Artificial Sequence
  chemically synthesized
tgtttatataaatcaagtagga

SEQ ID NO: 41877 - DNA, 22 bp, Artificial Sequence
  chemically synthesized
gtttatataaatcaagtaggaa

SEQ ID NO: 41878 - DNA, 22 bp, Artificial Sequence
  chemically synthesized
tttatataaatcaagtaggaat

SEQ ID NO: 41879 - DNA, 22 bp, Artificial Sequence
  chemically synthesized
atataaatcaagtaggaataca

SEQ ID NO: 41880 - DNA, 22 bp, Artificial Sequence
  chemically synthesized
tataaatcaagtaggaatacag

SEQ ID NO: 41881 - DNA, 22 bp, Artificial Sequence
  chemically synthesized
cccatcaatttcacttctagga

SEQ ID NO: 41882 - DNA, 22 bp, Artificial Sequence
  chemically synthesized
ccatcaatttcacttctaggaa

SEQ ID NO: 41883 - DNA, 22 bp, Artificial Sequence
  chemically synthesized
cacttctaggaacaccatgatt

SEQ ID NO: 41884 - DNA, 22 bp, Artificial Sequence
  chemically synthesized
acttctaggaacaccatgatta

SEQ ID NO: 41885 - DNA, 22 bp, Artificial Sequence
  chemically synthesized
ctaggaacaccatgattaatta

SEQ ID NO: 41886 - DNA, 22 bp, Artificial Sequence
  chemically synthesized
taggaacaccatgattaattag

SEQ ID NO: 41887 - DNA, 22 bp, Artificial Sequence
  chemically synthesized
ggaacaccatgattaattagcc

SEQ ID NO: 41888 - DNA, 22 bp, Artificial Sequence
  chemically synthesized
attagccaatgccagagctcta

SEQ ID NO: 41889 - DNA, 22 bp, Artificial Sequence
  chemically synthesized
gccaatgccagagctctacatg

SEQ ID NO: 41890 - DNA, 22 bp, Artificial Sequence
  chemically synthesized
tacatgagtcagactattctga

SEQ ID NO: 41891 - DNA, 22 bp, Artificial Sequence
  chemically synthesized
catgagtcagactattctgatg

SEQ ID NO: 41892 - DNA, 22 bp, Artificial Sequence
  chemically synthesized
ttctgatggctgctttgcctct

SEQ ID NO: 41893 - DNA, 22 bp, Artificial Sequence
  chemically synthesized
tgatggctgctttgcctctgct

SEQ ID NO: 41894 - DNA, 22 bp, Artificial Sequence
  chemically synthesized
atggctgctttgcctctgctgt

SEQ ID NO: 41895 - DNA, 22 bp, Artificial Sequence
  chemically synthesized
ctttgcctctgctgtctattat

SEQ ID NO: 41896 - DNA, 22 bp, Artificial Sequence
  chemically synthesized
tgcctctgctgtctattatggt

SEQ ID NO: 41897 - DNA, 22 bp, Artificial Sequence
  chemically synthesized
gcctctgctgtctattatggta

SEQ ID NO: 41898 - DNA, 22 bp, Artificial Sequence
  chemically synthesized
cctctgctgtctattatggtag

SEQ ID NO: 41899 - DNA, 22 bp, Artificial Sequence
  chemically synthesized
tgctgtctattatggtagttat

SEQ ID NO: 41900 - DNA, 22 bp, Artificial Sequence
  chemically synthesized
ctgtctattatggtagttatgc

SEQ ID NO: 41901 - DNA, 22 bp, Artificial Sequence
  chemically synthesized
tctattatggtagttatgccca

SEQ ID NO: 41902 - DNA, 22 bp, Artificial Sequence
  chemically synthesized
ttatggtagttatgcccacctt

SEQ ID NO: 41903 - DNA, 22 bp, Artificial Sequence
  chemically synthesized
tggtagttatgcccaccttgcc

SEQ ID NO: 41904 - DNA, 22 bp, Artificial Sequence
  chemically synthesized
tgcccaccttgcctttgatggt

SEQ ID NO: 41905 - DNA, 22 bp, Artificial Sequence
  chemically synthesized
gcctttgatggttcagtgccaa

SEQ ID NO: 41906 - DNA, 22 bp, Artificial Sequence
  chemically synthesized
cctttgatggttcagtgccaac

SEQ ID NO: 41907 - DNA, 22 bp, Artificial Sequence
  chemically synthesized
tgatggttcagtgccaacactt

SEQ ID NO: 41908 - DNA, 22 bp, Artificial Sequence
  chemically synthesized
gatggttcagtgccaacacttg

SEQ ID NO: 41909 - DNA, 22 bp, Artificial Sequence
  chemically synthesized
atggttcagtgccaacacttgg

SEQ ID NO: 41910 - DNA, 22 bp, Artificial Sequence
  chemically synthesized
agtgccaacacttggcccctgc

SEQ ID NO: 41911 - DNA, 22 bp, Artificial Sequence
  chemically synthesized
ggcccctgccacctcaggatcc

SEQ ID NO: 41912 - DNA, 22 bp, Artificial Sequence
  chemically synthesized
gcccctgccacctcaggatcca

SEQ ID NO: 41913 - DNA, 22 bp, Artificial Sequence
  chemically synthesized
ccacctcaggatccaattattc

SEQ ID NO: 41914 - DNA, 22 bp, Artificial Sequence
  chemically synthesized
aggatccaattattcccattgt

SEQ ID NO: 41915 - DNA, 22 bp, Artificial Sequence
  chemically synthesized
ttcccattgtatttaaattttg

SEQ ID NO: 41916 - DNA, 22 bp, Artificial Sequence
  chemically synthesized
ccattgtatttaaattttgtag

SEQ ID NO: 41917 - DNA, 22 bp, Artificial Sequence
  chemically synthesized
tatttaaattttgtagttgagt

SEQ ID NO: 41918 - DNA, 22 bp, Artificial Sequence
  chemically synthesized
aaattttgtagttgagtgactg

SEQ ID NO: 41919 - DNA, 22 bp, Artificial Sequence
  chemically synthesized
aattttgtagttgagtgactgt

SEQ ID NO: 41920 - DNA, 22 bp, Artificial Sequence
  chemically synthesized
tgtagttgagtgactgtggttc

SEQ ID NO: 41921 - DNA, 22 bp, Artificial Sequence
  chemically synthesized
gtagttgagtgactgtggttcc

SEQ ID NO: 41922 - DNA, 22 bp, Artificial Sequence
  chemically synthesized
tagttgagtgactgtggttcct

SEQ ID NO: 41923 - DNA, 22 bp, Artificial Sequence
  chemically synthesized
agtgactgtggttcctactgtt

SEQ ID NO: 41924 - DNA, 22 bp, Artificial Sequence
  chemically synthesized
tggttcctactgttagatctga

SEQ ID NO: 41925 - DNA, 22 bp, Artificial Sequence
  chemically synthesized
ctactgttagatctgacataca

SEQ ID NO: 41926 - DNA, 22 bp, Artificial Sequence
  chemically synthesized
ctgttagatctgacatacagag

SEQ ID NO: 41927 - DNA, 22 bp, Artificial Sequence
  chemically synthesized
ttagatctgacatacagagaag

SEQ ID NO: 41928 - DNA, 22 bp, Artificial Sequence
  chemically synthesized
gatctgacatacagagaagagc

SEQ ID NO: 41929 - DNA, 22 bp, Artificial Sequence
  chemically synthesized
acatacagagaagagcaattac

SEQ ID NO: 41930 - DNA, 22 bp, Artificial Sequence
  chemically synthesized
cgggctcttcaaaaatacaggt

SEQ ID NO: 41931 - DNA, 22 bp, Artificial Sequence
  chemically synthesized
ttcaaaaatacaggtgctgctc

SEQ ID NO: 41932 - DNA, 22 bp, Artificial Sequence
  chemically synthesized
caaaaatacaggtgctgctctc

SEQ ID NO: 41933 - DNA, 22 bp, Artificial Sequence
  chemically synthesized
aaaaatacaggtgctgctctca

SEQ ID NO: 41934 - DNA, 22 bp, Artificial Sequence
  chemically synthesized
ctctcacaaatctatttcacaa

SEQ ID NO: 41935 - DNA, 22 bp, Artificial Sequence
  chemically synthesized
tcacaaatctatttcacaaagc

SEQ ID NO: 41936 - DNA, 22 bp, Artificial Sequence
  chemically synthesized
acaaatctatttcacaaagctt

SEQ ID NO: 41937 - DNA, 22 bp, Artificial Sequence
  chemically synthesized
tttcacaaagcttcggccaagg

SEQ ID NO: 41938 - DNA, 22 bp, Artificial Sequence
  chemically synthesized
cacaaagcttcggccaagggtg

SEQ ID NO: 41939 - DNA, 22 bp, Artificial Sequence
  chemically synthesized
acaaagcttcggccaagggtgt

SEQ ID NO: 41940 - DNA, 22 bp, Artificial Sequence
  chemically synthesized
cggccaagggtgtatcttctgg

SEQ ID NO: 41941 - DNA, 22 bp, Artificial Sequence
  chemically synthesized
ggccaagggtgtatcttctgga

SEQ ID NO: 41942 - DNA, 22 bp, Artificial Sequence
  chemically synthesized
ctggaccctcccagctgggatg

SEQ ID NO: 41943 - DNA, 22 bp, Artificial Sequence
  chemically synthesized
tggaccctcccagctgggatga

SEQ ID NO: 41944 - DNA, 22 bp, Artificial Sequence
  chemically synthesized
gaccctcccagctgggatgagt

SEQ ID NO: 41945 - DNA, 22 bp, Artificial Sequence
  chemically synthesized
ccagctgggatgagtaggtcta

SEQ ID NO: 41946 - DNA, 22 bp, Artificial Sequence
  chemically synthesized
ggatgagtaggtctaaagtgac

SEQ ID NO: 41947 - DNA, 22 bp, Artificial Sequence
  chemically synthesized
aagtgactaatccactccacca

SEQ ID NO: 41948 - DNA, 22 bp, Artificial Sequence
  chemically synthesized
atccactccaccatcctaatct

SEQ ID NO: 41949 - DNA, 22 bp, Artificial Sequence
  chemically synthesized
caccatcctaatctccctaagc

SEQ ID NO: 41950 - DNA, 22 bp, Artificial Sequence
  chemically synthesized
atctccctaagcctttggatca

SEQ ID NO: 41951 - DNA, 22 bp, Artificial Sequence
  chemically synthesized
cctaagcctttggatcacttcc

SEQ ID NO: 41952 - DNA, 22 bp, Artificial Sequence
  chemically synthesized
agcctttggatcacttcctcta

SEQ ID NO: 41953 - DNA, 22 bp, Artificial Sequence
  chemically synthesized
tggatcacttcctctacattaa

SEQ ID NO: 41954 - DNA, 22 bp, Artificial Sequence
  chemically synthesized
ggatcacttcctctacattaaa

SEQ ID NO: 41955 - DNA, 22 bp, Artificial Sequence
  chemically synthesized
gatcacttcctctacattaaac

SEQ ID NO: 41956 - DNA, 22 bp, Artificial Sequence
  chemically synthesized
cctctacattaaaccaaggcat

SEQ ID NO: 41957 - DNA, 22 bp, Artificial Sequence
  chemically synthesized
ctctacattaaaccaaggcatt

SEQ ID NO: 41958 - DNA, 22 bp, Artificial Sequence
  chemically synthesized
tacattaaaccaaggcatttcc

SEQ ID NO: 41959 - DNA, 22 bp, Artificial Sequence
  chemically synthesized
cattaaaccaaggcatttccag

SEQ ID NO: 41960 - DNA, 22 bp, Artificial Sequence
  chemically synthesized
aaccaaggcatttccagctcac

SEQ ID NO: 41961 - DNA, 22 bp, Artificial Sequence
  chemically synthesized
ccagctcactaacattggacca

SEQ ID NO: 41962 - DNA, 22 bp, Artificial Sequence
  chemically synthesized
cagctcactaacattggaccat

SEQ ID NO: 41963 - DNA, 22 bp, Artificial Sequence
  chemically synthesized
actaacattggaccatctttta

SEQ ID NO: 41964 - DNA, 22 bp, Artificial Sequence
  chemically synthesized
acattggaccatcttttaatcc

SEQ ID NO: 41965 - DNA, 22 bp, Artificial Sequence
  chemically synthesized
gaccatcttttaatccatattt

SEQ ID NO: 41966 - DNA, 22 bp, Artificial Sequence
  chemically synthesized
ttaatccatatttcagctaacc

SEQ ID NO: 41967 - DNA, 22 bp, Artificial Sequence
  chemically synthesized
taatccatatttcagctaacca

SEQ ID NO: 41968 - DNA, 22 bp, Artificial Sequence
  chemically synthesized
aatccatatttcagctaaccaa

SEQ ID NO: 41969 - DNA, 22 bp, Artificial Sequence
  chemically synthesized
atccatatttcagctaaccaag

SEQ ID NO: 41970 - DNA, 22 bp, Artificial Sequence
  chemically synthesized
cagctaaccaagcaaataaact

SEQ ID NO: 41971 - DNA, 22 bp, Artificial Sequence
  chemically synthesized
agctaaccaagcaaataaacta

SEQ ID NO: 41972 - DNA, 22 bp, Artificial Sequence
  chemically synthesized
accaagcaaataaactattata

SEQ ID NO: 41973 - DNA, 22 bp, Artificial Sequence
  chemically synthesized
ttataacttttttttttttttt

SEQ ID NO: 41974 - DNA, 22 bp, Artificial Sequence
  chemically synthesized
taactttttttttttttttttt

SEQ ID NO: 41975 - DNA, 22 bp, Artificial Sequence
  chemically synthesized
ttttttttttttttttggaaat

SEQ ID NO: 41976 - DNA, 22 bp, Artificial Sequence
  chemically synthesized
tttttttttttttttggaaatg

SEQ ID NO: 41977 - DNA, 22 bp, Artificial Sequence
  chemically synthesized
ttttttttttttttggaaatgg

SEQ ID NO: 41978 - DNA, 22 bp, Artificial Sequence
  chemically synthesized
tttttttttttttggaaatgga

SEQ ID NO: 41979 - DNA, 22 bp, Artificial Sequence
  chemically synthesized
ttttttttttttggaaatggag

SEQ ID NO: 41980 - DNA, 22 bp, Artificial Sequence
  chemically synthesized
tttttttttttggaaatggagt

SEQ ID NO: 41981 - DNA, 22 bp, Artificial Sequence
  chemically synthesized
ttttttttttggaaatggagtc

SEQ ID NO: 41982 - DNA, 22 bp, Artificial Sequence
  chemically synthesized
tttttttttggaaatggagtct

SEQ ID NO: 41983 - DNA, 22 bp, Artificial Sequence
  chemically synthesized
ttttttttggaaatggagtctt

SEQ ID NO: 41984 - DNA, 22 bp, Artificial Sequence
  chemically synthesized
tttttttggaaatggagtcttg

SEQ ID NO: 41985 - DNA, 22 bp, Artificial Sequence
  chemically synthesized
ttttttggaaatggagtcttgc

SEQ ID NO: 41986 - DNA, 22 bp, Artificial Sequence
  chemically synthesized
tttttggaaatggagtcttgct

SEQ ID NO: 41987 - DNA, 22 bp, Artificial Sequence
  chemically synthesized
ttttggaaatggagtcttgctc

SEQ ID NO: 41988 - DNA, 22 bp, Artificial Sequence
  chemically synthesized
tttggaaatggagtcttgctct

SEQ ID NO: 41989 - DNA, 22 bp, Artificial Sequence
  chemically synthesized
ttggaaatggagtcttgctctg

SEQ ID NO: 41990 - DNA, 22 bp, Artificial Sequence
  chemically synthesized
tggaaatggagtcttgctctgt

SEQ ID NO: 41991 - DNA, 22 bp, Artificial Sequence
  chemically synthesized
ggaaatggagtcttgctctgtt

SEQ ID NO: 41992 - DNA, 22 bp, Artificial Sequence
  chemically synthesized
gaaatggagtcttgctctgtta

SEQ ID NO: 41993 - DNA, 22 bp, Artificial Sequence
  chemically synthesized
gctctgttaccaggctggaatg

SEQ ID NO: 41994 - DNA, 22 bp, Artificial Sequence
  chemically synthesized
ctctgttaccaggctggaatgc

SEQ ID NO: 41995 - DNA, 22 bp, Artificial Sequence
  chemically synthesized
tgttaccaggctggaatgcagt

SEQ ID NO: 41996 - DNA, 22 bp, Artificial Sequence
  chemically synthesized
ttaccaggctggaatgcagtgg

SEQ ID NO: 41997 - DNA, 22 bp, Artificial Sequence
  chemically synthesized
ccaggctggaatgcagtggggc

SEQ ID NO: 41998 - DNA, 22 bp, Artificial Sequence
  chemically synthesized
gaatgcagtggggcgatcttgg

SEQ ID NO: 41999 - DNA, 22 bp, Artificial Sequence
  chemically synthesized
ggctcactgcaatctctgcctc

SEQ ID NO: 42000 - DNA, 22 bp, Artificial Sequence
  chemically synthesized
gctcactgcaatctctgcctca

SEQ ID NO: 42001 - DNA, 22 bp, Artificial Sequence
  chemically synthesized
actgcaatctctgcctcacagg

SEQ ID NO: 42002 - DNA, 22 bp, Artificial Sequence
  chemically synthesized
caatctctgcctcacaggttca

SEQ ID NO: 42003 - DNA, 22 bp, Artificial Sequence
  chemically synthesized
tgcctcacaggttcaagcagtt

SEQ ID NO: 42004 - DNA, 22 bp, Artificial Sequence
  chemically synthesized
cctcacaggttcaagcagttct

SEQ ID NO: 42005 - DNA, 22 bp, Artificial Sequence
  chemically synthesized
acaggttcaagcagttctcttg

SEQ ID NO: 42006 - DNA, 22 bp, Artificial Sequence
  chemically synthesized
aagcagttctcttgcctcagcc

SEQ ID NO: 42007 - DNA, 22 bp, Artificial Sequence
  chemically synthesized
tcttgcctcagcctcccaagta

SEQ ID NO: 42008 - DNA, 22 bp, Artificial Sequence
  chemically synthesized
ttgcctcagcctcccaagtaga

SEQ ID NO: 42009 - DNA, 22 bp, Artificial Sequence
  chemically synthesized
gcctcagcctcccaagtagatg

SEQ ID NO: 42010 - DNA, 22 bp, Artificial Sequence
  chemically synthesized
cctcagcctcccaagtagatga

SEQ ID NO: 42011 - DNA, 22 bp, Artificial Sequence
  chemically synthesized
agcctcccaagtagatgagatt

SEQ ID NO: 42012 - DNA, 22 bp, Artificial Sequence
  chemically synthesized
ccaagtagatgagattacagtt

SEQ ID NO: 42013 - DNA, 22 bp, Artificial Sequence
  chemically synthesized
cagttacgcatcaccatgccca

SEQ ID NO: 42014 - DNA, 22 bp, Artificial Sequence
  chemically synthesized
cgcatcaccatgcccagctaat

SEQ ID NO: 42015 - DNA, 22 bp, Artificial Sequence
  chemically synthesized
atttttgtatttttagcagaga

SEQ ID NO: 42016 - DNA, 22 bp, Artificial Sequence
  chemically synthesized
ttgtatttttagcagagatggg

SEQ ID NO: 42017 - DNA, 22 bp, Artificial Sequence
  chemically synthesized
tgtatttttagcagagatgggg

SEQ ID NO: 42018 - DNA, 22 bp, Artificial Sequence
  chemically synthesized
gtatttttagcagagatggggt

SEQ ID NO: 42019 - DNA, 22 bp, Artificial Sequence
  chemically synthesized
tatttttagcagagatggggtt

SEQ ID NO: 42020 - DNA, 22 bp, Artificial Sequence
  chemically synthesized
ttagcagagatggggtttcacc

SEQ ID NO: 42021 - DNA, 22 bp, Artificial Sequence
  chemically synthesized
tagcagagatggggtttcacca

SEQ ID NO: 42022 - DNA, 22 bp, Artificial Sequence
  chemically synthesized
agcagagatggggtttcaccat

SEQ ID NO: 42023 - DNA, 22 bp, Artificial Sequence
  chemically synthesized
gcagagatggggtttcaccatt

SEQ ID NO: 42024 - DNA, 22 bp, Artificial Sequence
  chemically synthesized
caccattttagccagaattgtc

SEQ ID NO: 42025 - DNA, 22 bp, Artificial Sequence
  chemically synthesized
accattttagccagaattgtct

SEQ ID NO: 42026 - DNA, 22 bp, Artificial Sequence
  chemically synthesized
tagccagaattgtctcaatctc

SEQ ID NO: 42027 - DNA, 22 bp, Artificial Sequence
  chemically synthesized
agccagaattgtctcaatctcc

SEQ ID NO: 42028 - DNA, 22 bp, Artificial Sequence
  chemically synthesized
gccagaattgtctcaatctcct

SEQ ID NO: 42029 - DNA, 22 bp, Artificial Sequence
  chemically synthesized
tctcaatctcctgatctcgtga

SEQ ID NO: 42030 - DNA, 22 bp, Artificial Sequence
  chemically synthesized
aatctcctgatctcgtgatctg

SEQ ID NO: 42031 - DNA, 22 bp, Artificial Sequence
  chemically synthesized
ctgatctcgtgatctgcccgcc

SEQ ID NO: 42032 - DNA, 22 bp, Artificial Sequence
  chemically synthesized
atctcgtgatctgcccgccccc

SEQ ID NO: 42033 - DNA, 22 bp, Artificial Sequence
  chemically synthesized
gtgatctgcccgcccccgcctc

SEQ ID NO: 42034 - DNA, 22 bp, Artificial Sequence
  chemically synthesized
cccgcccccgcctcccaaggtg

SEQ ID NO: 42035 - DNA, 22 bp, Artificial Sequence
  chemically synthesized
ccaaggtgctgggattacaggc

SEQ ID NO: 42036 - DNA, 22 bp, Artificial Sequence
  chemically synthesized
ggattacaggcgtgagccactg

SEQ ID NO: 42037 - DNA, 22 bp, Artificial Sequence
  chemically synthesized
caggcgtgagccactgctcccg

SEQ ID NO: 42038 - DNA, 22 bp, Artificial Sequence
  chemically synthesized
ctcccggccctatcagaacctt

SEQ ID NO: 42039 - DNA, 22 bp, Artificial Sequence
  chemically synthesized
ccggccctatcagaaccttttc

SEQ ID NO: 42040 - DNA, 22 bp, Artificial Sequence
  chemically synthesized
tcagaaccttttctaagtcccc

SEQ ID NO: 42041 - DNA, 22 bp, Artificial Sequence
  chemically synthesized
ttctaagtccccgagctgcaac

SEQ ID NO: 42042 - DNA, 22 bp, Artificial Sequence
  chemically synthesized
tctaagtccccgagctgcaaca

SEQ ID NO: 42043 - DNA, 22 bp, Artificial Sequence
  chemically synthesized
ctaagtccccgagctgcaacat

SEQ ID NO: 42044 - DNA, 22 bp, Artificial Sequence
  chemically synthesized
taagtccccgagctgcaacatt

SEQ ID NO: 42045 - DNA, 22 bp, Artificial Sequence
  chemically synthesized
agtccccgagctgcaacattaa

SEQ ID NO: 42046 - DNA, 22 bp, Artificial Sequence
  chemically synthesized
caacattaaatgcagaatccct

SEQ ID NO: 42047 - DNA, 22 bp, Artificial Sequence
  chemically synthesized
aatgcagaatccctacttagta

SEQ ID NO: 42048 - DNA, 22 bp, Artificial Sequence
  chemically synthesized
cttagtagggccaaaccaataa

SEQ ID NO: 42049 - DNA, 22 bp, Artificial Sequence
  chemically synthesized
agtagggccaaaccaataaatt

SEQ ID NO: 42050 - DNA, 22 bp, Artificial Sequence
  chemically synthesized
gtagggccaaaccaataaattc

SEQ ID NO: 42051 - DNA, 22 bp, Artificial Sequence
  chemically synthesized
agcttgatccaactctatgtcc

SEQ ID NO: 42052 - DNA, 22 bp, Artificial Sequence
  chemically synthesized
gatccaactctatgtcccttcc

SEQ ID NO: 42053 - DNA, 22 bp, Artificial Sequence
  chemically synthesized
atccaactctatgtcccttcca

SEQ ID NO: 42054 - DNA, 22 bp, Artificial Sequence
  chemically synthesized
tatgtcccttccaccattatcc

SEQ ID NO: 42055 - DNA, 22 bp, Artificial Sequence
  chemically synthesized
tgtcccttccaccattatccct

SEQ ID NO: 42056 - DNA, 22 bp, Artificial Sequence
  chemically synthesized
ccaccattatcccttaccctta

SEQ ID NO: 42057 - DNA, 22 bp, Artificial Sequence
  chemically synthesized
caccattatcccttacccttaa

SEQ ID NO: 42058 - DNA, 22 bp, Artificial Sequence
  chemically synthesized
tcccttacccttaatatccatt

SEQ ID NO: 42059 - DNA, 22 bp, Artificial Sequence
  chemically synthesized
acccttaatatccattcccatg

SEQ ID NO: 42060 - DNA, 22 bp, Artificial Sequence
  chemically synthesized
cccttaatatccattcccatgc

SEQ ID NO: 42061 - DNA, 22 bp, Artificial Sequence
  chemically synthesized
aatatccattcccatgcctgtt

SEQ ID NO: 42062 - DNA, 22 bp, Artificial Sequence
  chemically synthesized
atatccattcccatgcctgttc

SEQ ID NO: 42063 - DNA, 22 bp, Artificial Sequence
  chemically synthesized
ccatgcctgttctccagatttc

SEQ ID NO: 42064 - DNA, 22 bp, Artificial Sequence
  chemically synthesized
ttctccagatttctgccaatat

SEQ ID NO: 42065 - DNA, 22 bp, Artificial Sequence
  chemically synthesized
tccagatttctgccaatataaa

SEQ ID NO: 42066 - DNA, 22 bp, Artificial Sequence
  chemically synthesized
cagatttctgccaatataaatt

SEQ ID NO: 42067 - DNA, 22 bp, Artificial Sequence
  chemically synthesized
ctgccaatataaattagaaagc

SEQ ID NO: 42068 - DNA, 22 bp, Artificial Sequence
  chemically synthesized
tgccaatataaattagaaagct

SEQ ID NO: 42069 - DNA, 22 bp, Artificial Sequence
  chemically synthesized
ccaatataaattagaaagctta

SEQ ID NO: 42070 - DNA, 22 bp, Artificial Sequence
  chemically synthesized
gaaagcttaagcagttctttta

SEQ ID NO: 42071 - DNA, 22 bp, Artificial Sequence
  chemically synthesized
aagcagttcttttagagtataa

SEQ ID NO: 42072 - DNA, 22 bp, Artificial Sequence
  chemically synthesized
agcagttcttttagagtataat

SEQ ID NO: 42073 - DNA, 22 bp, Artificial Sequence
  chemically synthesized
ttttagagtataatgcacctcc

SEQ ID NO: 42074 - DNA, 22 bp, Artificial Sequence
  chemically synthesized
ttagagtataatgcacctcctc

SEQ ID NO: 42075 - DNA, 22 bp, Artificial Sequence
  chemically synthesized
tagagtataatgcacctcctca

SEQ ID NO: 42076 - DNA, 22 bp, Artificial Sequence
  chemically synthesized
agagtataatgcacctcctcat

SEQ ID NO: 42077 - DNA, 22 bp, Artificial Sequence
  chemically synthesized
gagtataatgcacctcctcatg

SEQ ID NO: 42078 - DNA, 22 bp, Artificial Sequence
  chemically synthesized
ctcatgggtcacactctgaacc

SEQ ID NO: 42079 - DNA, 22 bp, Artificial Sequence
  chemically synthesized
atgggtcacactctgaacctca

SEQ ID NO: 42080 - DNA, 22 bp, Artificial Sequence
  chemically synthesized
tgaacctcacctctggggcccg

SEQ ID NO: 42081 - DNA, 22 bp, Artificial Sequence
  chemically synthesized
aacctcacctctggggcccgca

SEQ ID NO: 42082 - DNA, 22 bp, Artificial Sequence
  chemically synthesized
acctctggggcccgcaaggaat

SEQ ID NO: 42083 - DNA, 22 bp, Artificial Sequence
  chemically synthesized
tggggcccgcaaggaatttagc

SEQ ID NO: 42084 - DNA, 22 bp, Artificial Sequence
  chemically synthesized
gggcccgcaaggaatttagcct

SEQ ID NO: 42085 - DNA, 22 bp, Artificial Sequence
  chemically synthesized
agcctagttataggtctagaag

SEQ ID NO: 42086 - DNA, 22 bp, Artificial Sequence
  chemically synthesized
gcctagttataggtctagaagc

SEQ ID NO: 42087 - DNA, 22 bp, Artificial Sequence
  chemically synthesized
gttataggtctagaagcattca

SEQ ID NO: 42088 - DNA, 22 bp, Artificial Sequence
  chemically synthesized
taggtctagaagcattcagggg

SEQ ID NO: 42089 - DNA, 22 bp, Artificial Sequence
  chemically synthesized
gaagcattcaggggcattaggg

SEQ ID NO: 42090 - DNA, 22 bp, Artificial Sequence
  chemically synthesized
aggggcattaggggtgcctctt

SEQ ID NO: 42091 - DNA, 22 bp, Artificial Sequence
  chemically synthesized
ggggtgcctcttgaggagaatc

SEQ ID NO: 42092 - DNA, 22 bp, Artificial Sequence
  chemically synthesized
ttgaggagaatcaacattatct

SEQ ID NO: 42093 - DNA, 22 bp, Artificial Sequence
  chemically synthesized
gaggagaatcaacattatcttg

SEQ ID NO: 42094 - DNA, 22 bp, Artificial Sequence
  chemically synthesized
aggagaatcaacattatcttgc

SEQ ID NO: 42095 - DNA, 22 bp, Artificial Sequence
  chemically synthesized
tcttgcctggcagctgcctcag

SEQ ID NO: 42096 - DNA, 22 bp, Artificial Sequence
  chemically synthesized
gcctggcagctgcctcagggaa

SEQ ID NO: 42097 - DNA, 22 bp, Artificial Sequence
  chemically synthesized
cctggcagctgcctcagggaag

SEQ ID NO: 42098 - DNA, 22 bp, Artificial Sequence
  chemically synthesized
gcagctgcctcagggaaggcca

SEQ ID NO: 42099 - DNA, 22 bp, Artificial Sequence
  chemically synthesized
cctcagggaaggccatcactgt

SEQ ID NO: 42100 - DNA, 22 bp, Artificial Sequence
  chemically synthesized
agggaaggccatcactgttgcc

SEQ ID NO: 42101 - DNA, 22 bp, Artificial Sequence
  chemically synthesized
ttgcctcaagcagtgcagggtt

SEQ ID NO: 42102 - DNA, 22 bp, Artificial Sequence
  chemically synthesized
cctcaagcagtgcagggtttac

SEQ ID NO: 42103 - DNA, 22 bp, Artificial Sequence
  chemically synthesized
aagcagtgcagggtttacatcc

SEQ ID NO: 42104 - DNA, 22 bp, Artificial Sequence
  chemically synthesized
acatcctcagacaaaggtggaa

SEQ ID NO: 42105 - DNA, 22 bp, Artificial Sequence
  chemically synthesized
catcctcagacaaaggtggaaa

SEQ ID NO: 42106 - DNA, 22 bp, Artificial Sequence
  chemically synthesized
agacaaaggtggaaaggctaat

SEQ ID NO: 42107 - DNA, 22 bp, Artificial Sequence
  chemically synthesized
atggcagcacgggtcagggagg

SEQ ID NO: 42108 - DNA, 22 bp, Artificial Sequence
  chemically synthesized
ccactactggggatggggaaac

SEQ ID NO: 42109 - DNA, 22 bp, Artificial Sequence
  chemically synthesized
ctggggatggggaaactgtttc

SEQ ID NO: 42110 - DNA, 22 bp, Artificial Sequence
  chemically synthesized
gggatggggaaactgtttcttc

SEQ ID NO: 42111 - DNA, 22 bp, Artificial Sequence
  chemically synthesized
tttcttctggcaaaaaagtttc

SEQ ID NO: 42112 - DNA, 22 bp, Artificial Sequence
  chemically synthesized
cttctggcaaaaaagtttcatc

SEQ ID NO: 42113 - DNA, 22 bp, Artificial Sequence
  chemically synthesized
ttctggcaaaaaagtttcatca

SEQ ID NO: 42114 - DNA, 22 bp, Artificial Sequence
  chemically synthesized
ctggcaaaaaagtttcatcaga

SEQ ID NO: 42115 - DNA, 22 bp, Artificial Sequence
  chemically synthesized
tggcaaaaaagtttcatcagag

SEQ ID NO: 42116 - DNA, 22 bp, Artificial Sequence
  chemically synthesized
gcaaaaaagtttcatcagagtt

SEQ ID NO: 42117 - DNA, 22 bp, Artificial Sequence
  chemically synthesized
catcagagttcacaaactcagt

SEQ ID NO: 42118 - DNA, 22 bp, Artificial Sequence
  chemically synthesized
atcagagttcacaaactcagtg

SEQ ID NO: 42119 - DNA, 22 bp, Artificial Sequence
  chemically synthesized
acaaactcagtgtcctcagctt

SEQ ID NO: 42120 - DNA, 22 bp, Artificial Sequence
  chemically synthesized
agtgtcctcagcttcatcaggg

SEQ ID NO: 42121 - DNA, 22 bp, Artificial Sequence
  chemically synthesized
agcttcatcagggttctcccac

SEQ ID NO: 42122 - DNA, 22 bp, Artificial Sequence
  chemically synthesized
catcagggttctcccacacatc

SEQ ID NO: 42123 - DNA, 22 bp, Artificial Sequence
  chemically synthesized
atcagggttctcccacacatcc

SEQ ID NO: 42124 - DNA, 22 bp, Artificial Sequence
  chemically synthesized
tcccacacatccccactccaag

SEQ ID NO: 42125 - DNA, 22 bp, Artificial Sequence
  chemically synthesized
ccacacatccccactccaagtt

SEQ ID NO: 42126 - DNA, 22 bp, Artificial Sequence
  chemically synthesized
caagttccagggtcccattttt

SEQ ID NO: 42127 - DNA, 22 bp, Artificial Sequence
  chemically synthesized
cagggtcccatttttttccagt

SEQ ID NO: 42128 - DNA, 22 bp, Artificial Sequence
  chemically synthesized
ttttccagtcaatgccctcact

SEQ ID NO: 42129 - DNA, 22 bp, Artificial Sequence
  chemically synthesized
tttccagtcaatgccctcactt

SEQ ID NO: 42130 - DNA, 22 bp, Artificial Sequence
  chemically synthesized
ttccagtcaatgccctcacttt

SEQ ID NO: 42131 - DNA, 22 bp, Artificial Sequence
  chemically synthesized
tccagtcaatgccctcacttta

SEQ ID NO: 42132 - DNA, 22 bp, Artificial Sequence
  chemically synthesized
ccagtcaatgccctcactttaa

SEQ ID NO: 42133 - DNA, 22 bp, Artificial Sequence
  chemically synthesized
cagtcaatgccctcactttaac

SEQ ID NO: 42134 - DNA, 22 bp, Artificial Sequence
  chemically synthesized
actttaacagtaaacacctggc

SEQ ID NO: 42135 - DNA, 22 bp, Artificial Sequence
  chemically synthesized
taacagtaaacacctggcaagg

SEQ ID NO: 42136 - DNA, 22 bp, Artificial Sequence
  chemically synthesized
aacagtaaacacctggcaaggc

SEQ ID NO: 42137 - DNA, 22 bp, Artificial Sequence
  chemically synthesized
acagtaaacacctggcaaggct

SEQ ID NO: 42138 - DNA, 22 bp, Artificial Sequence
  chemically synthesized
gcaaggctgtgcatgcacctct

SEQ ID NO: 42139 - DNA, 22 bp, Artificial Sequence
  chemically synthesized
tgcatgcacctcttgttgcaga

SEQ ID NO: 42140 - DNA, 22 bp, Artificial Sequence
  chemically synthesized
ttgttgcagatcagctactcgc

SEQ ID NO: 42141 - DNA, 22 bp, Artificial Sequence
  chemically synthesized
gttgcagatcagctactcgcat

SEQ ID NO: 42142 - DNA, 22 bp, Artificial Sequence
  chemically synthesized
ttgcagatcagctactcgcatg

SEQ ID NO: 42143 - DNA, 22 bp, Artificial Sequence
  chemically synthesized
cagatcagctactcgcatgata

SEQ ID NO: 42144 - DNA, 22 bp, Artificial Sequence
  chemically synthesized
ctcgcatgataacagcttgtct

SEQ ID NO: 42145 - DNA, 22 bp, Artificial Sequence
  chemically synthesized
gcatgataacagcttgtctctg

SEQ ID NO: 42146 - DNA, 22 bp, Artificial Sequence
  chemically synthesized
gtctctgttttttcacaatttc

SEQ ID NO: 42147 - DNA, 22 bp, Artificial Sequence
  chemically synthesized
tctctgttttttcacaatttca

SEQ ID NO: 42148 - DNA, 22 bp, Artificial Sequence
  chemically synthesized
tgttttttcacaatttcaactc

SEQ ID NO: 42149 - DNA, 22 bp, Artificial Sequence
  chemically synthesized
ttttttcacaatttcaactctt

SEQ ID NO: 42150 - DNA, 22 bp, Artificial Sequence
  chemically synthesized
tttcacaatttcaactctttct

SEQ ID NO: 42151 - DNA, 22 bp, Artificial Sequence
  chemically synthesized
ttcacaatttcaactctttctc

SEQ ID NO: 42152 - DNA, 22 bp, Artificial Sequence
  chemically synthesized
tcacaatttcaactctttctct

SEQ ID NO: 42153 - DNA, 22 bp, Artificial Sequence
  chemically synthesized
cacaatttcaactctttctcta

SEQ ID NO: 42154 - DNA, 22 bp, Artificial Sequence
  chemically synthesized
acaatttcaactctttctctac

SEQ ID NO: 42155 - DNA, 22 bp, Artificial Sequence
  chemically synthesized
caactctttctctacaggagtt

SEQ ID NO: 42156 - DNA, 22 bp, Artificial Sequence
  chemically synthesized
aactctttctctacaggagtta

SEQ ID NO: 42157 - DNA, 22 bp, Artificial Sequence
  chemically synthesized
tttctctacaggagttaaaact

SEQ ID NO: 42158 - DNA, 22 bp, Artificial Sequence
  chemically synthesized
tctctacaggagttaaaactct

SEQ ID NO: 42159 - DNA, 22 bp, Artificial Sequence
  chemically synthesized
ctctacaggagttaaaactctc

SEQ ID NO: 42160 - DNA, 22 bp, Artificial Sequence
  chemically synthesized
tctacaggagttaaaactctca

SEQ ID NO: 42161 - DNA, 22 bp, Artificial Sequence
  chemically synthesized
tacaggagttaaaactctcatt

SEQ ID NO: 42162 - DNA, 22 bp, Artificial Sequence
  chemically synthesized
caggagttaaaactctcattca

SEQ ID NO: 42163 - DNA, 22 bp, Artificial Sequence
  chemically synthesized
aaactctcattcagggcaatct

SEQ ID NO: 42164 - DNA, 22 bp, Artificial Sequence
  chemically synthesized
tcattcagggcaatcttagcag

SEQ ID NO: 42165 - DNA, 22 bp, Artificial Sequence
  chemically synthesized
attcagggcaatcttagcagat

SEQ ID NO: 42166 - DNA, 22 bp, Artificial Sequence
  chemically synthesized
agggcaatcttagcagatttgt

SEQ ID NO: 42167 - DNA, 22 bp, Artificial Sequence
  chemically synthesized
agcagatttgtggctcagtatc

SEQ ID NO: 42168 - DNA, 22 bp, Artificial Sequence
  chemically synthesized
gcagatttgtggctcagtatct

SEQ ID NO: 42169 - DNA, 22 bp, Artificial Sequence
  chemically synthesized
gtggctcagtatctgcttctga

SEQ ID NO: 42170 - DNA, 22 bp, Artificial Sequence
  chemically synthesized
tggctcagtatctgcttctgaa

SEQ ID NO: 42171 - DNA, 22 bp, Artificial Sequence
  chemically synthesized
agtatctgcttctgaaggtggg

SEQ ID NO: 42172 - DNA, 22 bp, Artificial Sequence
  chemically synthesized
cttctgaaggtgggagacagat

SEQ ID NO: 42173 - DNA, 22 bp, Artificial Sequence
  chemically synthesized
ctgaaggtgggagacagatccc

SEQ ID NO: 42174 - DNA, 22 bp, Artificial Sequence
  chemically synthesized
tgaaggtgggagacagatcccc

SEQ ID NO: 42175 - DNA, 22 bp, Artificial Sequence
  chemically synthesized
aaggtgggagacagatcccctg

SEQ ID NO: 42176 - DNA, 22 bp, Artificial Sequence
  chemically synthesized
agatcatcattttctttcatct

SEQ ID NO: 42177 - DNA, 22 bp, Artificial Sequence
  chemically synthesized
tctttcatctctttctccagag

SEQ ID NO: 42178 - DNA, 22 bp, Artificial Sequence
  chemically synthesized
ctttcatctctttctccagaga

SEQ ID NO: 42179 - DNA, 22 bp, Artificial Sequence
  chemically synthesized
tttcatctctttctccagagaa

SEQ ID NO: 42180 - DNA, 22 bp, Artificial Sequence
  chemically synthesized
tcatctctttctccagagaact

SEQ ID NO: 42181 - DNA, 22 bp, Artificial Sequence
  chemically synthesized
catctctttctccagagaactt

SEQ ID NO: 42182 - DNA, 22 bp, Artificial Sequence
  chemically synthesized
atctctttctccagagaactta

SEQ ID NO: 42183 - DNA, 22 bp, Artificial Sequence
  chemically synthesized
tttctccagagaacttaggagc

SEQ ID NO: 42184 - DNA, 22 bp, Artificial Sequence
  chemically synthesized
tctccagagaacttaggagcaa

SEQ ID NO: 42185 - DNA, 22 bp, Artificial Sequence
  chemically synthesized
ctccagagaacttaggagcaat

SEQ ID NO: 42186 - DNA, 22 bp, Artificial Sequence
  chemically synthesized
tccagagaacttaggagcaatc

SEQ ID NO: 42187 - DNA, 22 bp, Artificial Sequence
  chemically synthesized
cagagaacttaggagcaatcaa

SEQ ID NO: 42188 - DNA, 22 bp, Artificial Sequence
  chemically synthesized
aggagcaatcaaccaacttcat

SEQ ID NO: 42189 - DNA, 22 bp, Artificial Sequence
  chemically synthesized
ggagcaatcaaccaacttcatt

SEQ ID NO: 42190 - DNA, 22 bp, Artificial Sequence
  chemically synthesized
cattatgttccttggttctcca

SEQ ID NO: 42191 - DNA, 22 bp, Artificial Sequence
  chemically synthesized
attatgttccttggttctccac

SEQ ID NO: 42192 - DNA, 22 bp, Artificial Sequence
  chemically synthesized
tgttccttggttctccacatat

SEQ ID NO: 42193 - DNA, 22 bp, Artificial Sequence
  chemically synthesized
cttggttctccacatatagtca

SEQ ID NO: 42194 - DNA, 22 bp, Artificial Sequence
  chemically synthesized
ggttctccacatatagtcaaag

SEQ ID NO: 42195 - DNA, 22 bp, Artificial Sequence
  chemically synthesized
gttctccacatatagtcaaagg

SEQ ID NO: 42196 - DNA, 22 bp, Artificial Sequence
  chemically synthesized
tccacatatagtcaaaggtatt

SEQ ID NO: 42197 - DNA, 22 bp, Artificial Sequence
  chemically synthesized
cacatatagtcaaaggtattat

SEQ ID NO: 42198 - DNA, 22 bp, Artificial Sequence
  chemically synthesized
tgtatagagtcactaaactcct

SEQ ID NO: 42199 - DNA, 22 bp, Artificial Sequence
  chemically synthesized
aactccttgcctctcataagtg

SEQ ID NO: 42200 - DNA, 22 bp, Artificial Sequence
  chemically synthesized
cttgcctctcataagtgatgaa

SEQ ID NO: 42201 - DNA, 22 bp, Artificial Sequence
  chemically synthesized
gcctctcataagtgatgaatca

SEQ ID NO: 42202 - DNA, 22 bp, Artificial Sequence
  chemically synthesized
cctctcataagtgatgaatcag

SEQ ID NO: 42203 - DNA, 22 bp, Artificial Sequence
  chemically synthesized
tcataagtgatgaatcagtagt

SEQ ID NO: 42204 - DNA, 22 bp, Artificial Sequence
  chemically synthesized
ataagtgatgaatcagtagtgt

SEQ ID NO: 42205 - DNA, 22 bp, Artificial Sequence
  chemically synthesized
attttgcataactctctaaaca

SEQ ID NO: 42206 - DNA, 22 bp, Artificial Sequence
  chemically synthesized
ttttgcataactctctaaacaa

SEQ ID NO: 42207 - DNA, 22 bp, Artificial Sequence
  chemically synthesized
tgcataactctctaaacaattc

SEQ ID NO: 42208 - DNA, 22 bp, Artificial Sequence
  chemically synthesized
gcataactctctaaacaattca

SEQ ID NO: 42209 - DNA, 22 bp, Artificial Sequence
  chemically synthesized
cataactctctaaacaattcag

SEQ ID NO: 42210 - DNA, 22 bp, Artificial Sequence
  chemically synthesized
tctaaacaattcaggccaagta

SEQ ID NO: 42211 - DNA, 22 bp, Artificial Sequence
  chemically synthesized
taaacaattcaggccaagtact

SEQ ID NO: 42212 - DNA, 22 bp, Artificial Sequence
  chemically synthesized
aacaattcaggccaagtactat

SEQ ID NO: 42213 - DNA, 22 bp, Artificial Sequence
  chemically synthesized
aggccaagtactatcagtgttc

SEQ ID NO: 42214 - DNA, 22 bp, Artificial Sequence
  chemically synthesized
tcagtgttctccatactattag

SEQ ID NO: 42215 - DNA, 22 bp, Artificial Sequence
  chemically synthesized
tccatactattagaagtagagt

SEQ ID NO: 42216 - DNA, 22 bp, Artificial Sequence
  chemically synthesized
catactattagaagtagagtcc

SEQ ID NO: 42217 - DNA, 22 bp, Artificial Sequence
  chemically synthesized
ttagaagtagagtccttagcat

SEQ ID NO: 42218 - DNA, 22 bp, Artificial Sequence
  chemically synthesized
gaagtagagtccttagcatttt

SEQ ID NO: 42219 - DNA, 22 bp, Artificial Sequence
  chemically synthesized
agcattttttggtctaatcata

SEQ ID NO: 42220 - DNA, 22 bp, Artificial Sequence
  chemically synthesized
gcattttttggtctaatcatat

SEQ ID NO: 42221 - DNA, 22 bp, Artificial Sequence
  chemically synthesized
tttggtctaatcatattaatca

SEQ ID NO: 42222 - DNA, 22 bp, Artificial Sequence
  chemically synthesized
ttggtctaatcatattaatcag

SEQ ID NO: 42223 - DNA, 22 bp, Artificial Sequence
  chemically synthesized
tggtctaatcatattaatcagc

SEQ ID NO: 42224 - DNA, 22 bp, Artificial Sequence
  chemically synthesized
ggtctaatcatattaatcagcc

SEQ ID NO: 42225 - DNA, 22 bp, Artificial Sequence
  chemically synthesized
gtctaatcatattaatcagcca

SEQ ID NO: 42226 - DNA, 22 bp, Artificial Sequence
  chemically synthesized
atcatattaatcagccaacacc

SEQ ID NO: 42227 - DNA, 22 bp, Artificial Sequence
  chemically synthesized
atcagccaacaccagaagtccc

SEQ ID NO: 42228 - DNA, 22 bp, Artificial Sequence
  chemically synthesized
catccttaatattctgttcctc

SEQ ID NO: 42229 - DNA, 22 bp, Artificial Sequence
  chemically synthesized
aatattctgttcctcaagaacc

SEQ ID NO: 42230 - DNA, 22 bp, Artificial Sequence
  chemically synthesized
atattctgttcctcaagaacca

SEQ ID NO: 42231 - DNA, 22 bp, Artificial Sequence
  chemically synthesized
tgttcctcaagaaccacttctg

SEQ ID NO: 42232 - DNA, 22 bp, Artificial Sequence
  chemically synthesized
ttcctcaagaaccacttctggt

SEQ ID NO: 42233 - DNA, 22 bp, Artificial Sequence
  chemically synthesized
ctcaagaaccacttctggtatg

SEQ ID NO: 42234 - DNA, 22 bp, Artificial Sequence
  chemically synthesized
aagaaccacttctggtatgaaa

SEQ ID NO: 42235 - DNA, 22 bp, Artificial Sequence
  chemically synthesized
ctggtatgaaaatctgtattag

SEQ ID NO: 42236 - DNA, 22 bp, Artificial Sequence
  chemically synthesized
tggtatgaaaatctgtattagt

SEQ ID NO: 42237 - DNA, 22 bp, Artificial Sequence
  chemically synthesized
gtatgaaaatctgtattagtcg

SEQ ID NO: 42238 - DNA, 22 bp, Artificial Sequence
  chemically synthesized
tattagtcggggttctctagag

SEQ ID NO: 42239 - DNA, 22 bp, Artificial Sequence
  chemically synthesized
gtcggggttctctagagggaca

SEQ ID NO: 42240 - DNA, 22 bp, Artificial Sequence
  chemically synthesized
tctagagggacagaactaatag

SEQ ID NO: 42241 - DNA, 22 bp, Artificial Sequence
  chemically synthesized
tagagggacagaactaatagga

SEQ ID NO: 42242 - DNA, 22 bp, Artificial Sequence
  chemically synthesized
gagggacagaactaataggaga

SEQ ID NO: 42243 - DNA, 22 bp, Artificial Sequence
  chemically synthesized
ataggagattatatatatatat

SEQ ID NO: 42244 - DNA, 22 bp, Artificial Sequence
  chemically synthesized
tatatatatatatatgagagag

SEQ ID NO: 42245 - DNA, 22 bp, Artificial Sequence
  chemically synthesized
tatctatctatagatatagata

SEQ ID NO: 42246 - DNA, 22 bp, Artificial Sequence
  chemically synthesized
tctatagatatagatatactca

SEQ ID NO: 42247 - DNA, 22 bp, Artificial Sequence
  chemically synthesized
tagatatagatatactcacaca

SEQ ID NO: 42248 - DNA, 22 bp, Artificial Sequence
  chemically synthesized
acacaaaggggagcttattaag

SEQ ID NO: 42249 - DNA, 22 bp, Artificial Sequence
  chemically synthesized
attaagtggtattaactcacaa

SEQ ID NO: 42250 - DNA, 22 bp, Artificial Sequence
  chemically synthesized
ttaagtggtattaactcacaag

SEQ ID NO: 42251 - DNA, 22 bp, Artificial Sequence
  chemically synthesized
agtggtattaactcacaagatt

SEQ ID NO: 42252 - DNA, 22 bp, Artificial Sequence
  chemically synthesized
actcacaagattacaaggtccc

SEQ ID NO: 42253 - DNA, 22 bp, Artificial Sequence
  chemically synthesized
acaagattacaaggtcccataa

SEQ ID NO: 42254 - DNA, 22 bp, Artificial Sequence
  chemically synthesized
caaggtcccataataggccacc

SEQ ID NO: 42255 - DNA, 22 bp, Artificial Sequence
  chemically synthesized
caatctgaggagcaaggaagac

SEQ ID NO: 42256 - DNA, 22 bp, Artificial Sequence
  chemically synthesized
aggagcaaggaagacagtccaa

SEQ ID NO: 42257 - DNA, 22 bp, Artificial Sequence
  chemically synthesized
aagaacttggagtccgatgttc

SEQ ID NO: 42258 - DNA, 22 bp, Artificial Sequence
  chemically synthesized
ggagtccgatgttcaagagcag

SEQ ID NO: 42259 - DNA, 22 bp, Artificial Sequence
  chemically synthesized
gagtccgatgttcaagagcagg

SEQ ID NO: 42260 - DNA, 22 bp, Artificial Sequence
  chemically synthesized
aagagcaggaaggatccagcac

SEQ ID NO: 42261 - DNA, 22 bp, Artificial Sequence
  chemically synthesized
ggaggctaagccagtctagcct

SEQ ID NO: 42262 - DNA, 22 bp, Artificial Sequence
  chemically synthesized
agccagtctagcctttttacat

SEQ ID NO: 42263 - DNA, 22 bp, Artificial Sequence
  chemically synthesized
gcctttttacatttttctgcca

SEQ ID NO: 42264 - DNA, 22 bp, Artificial Sequence
  chemically synthesized
tttacatttttctgccagcttt

SEQ ID NO: 42265 - DNA, 22 bp, Artificial Sequence
  chemically synthesized
ttacatttttctgccagcttta

SEQ ID NO: 42266 - DNA, 22 bp, Artificial Sequence
  chemically synthesized
tacatttttctgccagctttat

SEQ ID NO: 42267 - DNA, 22 bp, Artificial Sequence
  chemically synthesized
acatttttctgccagctttata

SEQ ID NO: 42268 - DNA, 22 bp, Artificial Sequence
  chemically synthesized
catttttctgccagctttatat

SEQ ID NO: 42269 - DNA, 22 bp, Artificial Sequence
  chemically synthesized
ttctgccagctttatattctgg

SEQ ID NO: 42270 - DNA, 22 bp, Artificial Sequence
  chemically synthesized
tctgccagctttatattctggc

SEQ ID NO: 42271 - DNA, 22 bp, Artificial Sequence
  chemically synthesized
ctgccagctttatattctggct

SEQ ID NO: 42272 - DNA, 22 bp, Artificial Sequence
  chemically synthesized
tgccagctttatattctggctc

SEQ ID NO: 42273 - DNA, 22 bp, Artificial Sequence
  chemically synthesized
ccagctttatattctggctcta

SEQ ID NO: 42274 - DNA, 22 bp, Artificial Sequence
  chemically synthesized
tatattctggctctacagcttg

SEQ ID NO: 42275 - DNA, 22 bp, Artificial Sequence
  chemically synthesized
atattctggctctacagcttgg

SEQ ID NO: 42276 - DNA, 22 bp, Artificial Sequence
  chemically synthesized
tattctggctctacagcttggg

SEQ ID NO: 42277 - DNA, 22 bp, Artificial Sequence
  chemically synthesized
tggctctacagcttgggggcag

SEQ ID NO: 42278 - DNA, 22 bp, Artificial Sequence
  chemically synthesized
gctctacagcttgggggcagca

SEQ ID NO: 42279 - DNA, 22 bp, Artificial Sequence
  chemically synthesized
tacagcttgggggcagcagggg

SEQ ID NO: 42280 - DNA, 22 bp, Artificial Sequence
  chemically synthesized
cagcttgggggcagcaggggca

SEQ ID NO: 42281 - DNA, 22 bp, Artificial Sequence
  chemically synthesized
gggggcagcaggggcaggggcc

SEQ ID NO: 42282 - DNA, 22 bp, Artificial Sequence
  chemically synthesized
ggggcagcaggggcaggggcct

SEQ ID NO: 42283 - DNA, 22 bp, Artificial Sequence
  chemically synthesized
agggtgcttgcagggatgacac

SEQ ID NO: 42284 - DNA, 22 bp, Artificial Sequence
  chemically synthesized
gcagggatgacacactggcctc

SEQ ID NO: 42285 - DNA, 22 bp, Artificial Sequence
  chemically synthesized
cagggatgacacactggcctct

SEQ ID NO: 42286 - DNA, 22 bp, Artificial Sequence
  chemically synthesized
gcctcttttccatagggtggct

SEQ ID NO: 42287 - DNA, 22 bp, Artificial Sequence
  chemically synthesized
ttttccatagggtggctggggc

SEQ ID NO: 42288 - DNA, 22 bp, Artificial Sequence
  chemically synthesized
ttccatagggtggctggggcac

SEQ ID NO: 42289 - DNA, 22 bp, Artificial Sequence
  chemically synthesized
tccatagggtggctggggcaca

SEQ ID NO: 42290 - DNA, 22 bp, Artificial Sequence
  chemically synthesized
ccatagggtggctggggcacac

SEQ ID NO: 42291 - DNA, 22 bp, Artificial Sequence
  chemically synthesized
catagggtggctggggcacact

SEQ ID NO: 42292 - DNA, 22 bp, Artificial Sequence
  chemically synthesized
gggcacactggggtgtgagtaa

SEQ ID NO: 42293 - DNA, 22 bp, Artificial Sequence
  chemically synthesized
gggtgtgagtaaagcactcagg

SEQ ID NO: 42294 - DNA, 22 bp, Artificial Sequence
  chemically synthesized
aggatcttttttccttccctag

SEQ ID NO: 42295 - DNA, 22 bp, Artificial Sequence
  chemically synthesized
ttttccttccctagtccaagta

SEQ ID NO: 42296 - DNA, 22 bp, Artificial Sequence
  chemically synthesized
tttccttccctagtccaagtac

SEQ ID NO: 42297 - DNA, 22 bp, Artificial Sequence
  chemically synthesized
ttccttccctagtccaagtaca

SEQ ID NO: 42298 - DNA, 22 bp, Artificial Sequence
  chemically synthesized
tccttccctagtccaagtacag

SEQ ID NO: 42299 - DNA, 22 bp, Artificial Sequence
  chemically synthesized
ccttccctagtccaagtacagc

SEQ ID NO: 42300 - DNA, 22 bp, Artificial Sequence
  chemically synthesized
cttccctagtccaagtacagca

SEQ ID NO: 42301 - DNA, 22 bp, Artificial Sequence
  chemically synthesized
ccctagtccaagtacagcaagg

SEQ ID NO: 42302 - DNA, 22 bp, Artificial Sequence
  chemically synthesized
cctagtccaagtacagcaaggg

SEQ ID NO: 42303 - DNA, 22 bp, Artificial Sequence
  chemically synthesized
gtccaagtacagcaagggcagt

SEQ ID NO: 42304 - DNA, 22 bp, Artificial Sequence
  chemically synthesized
cagtgttagtggcagaaggact

SEQ ID NO: 42305 - DNA, 22 bp, Artificial Sequence
  chemically synthesized
gtggcagaaggactttcagtca

SEQ ID NO: 42306 - DNA, 22 bp, Artificial Sequence
  chemically synthesized
tcagtcacctctgggagcttca

SEQ ID NO: 42307 - DNA, 22 bp, Artificial Sequence
  chemically synthesized
cagtcacctctgggagcttcac

SEQ ID NO: 42308 - DNA, 22 bp, Artificial Sequence
  chemically synthesized
agtcacctctgggagcttcacc

SEQ ID NO: 42309 - DNA, 22 bp, Artificial Sequence
  chemically synthesized
tgggagcttcaccccacaaaaa

SEQ ID NO: 42310 - DNA, 22 bp, Artificial Sequence
  chemically synthesized
ggagcttcaccccacaaaaaca

SEQ ID NO: 42311 - DNA, 22 bp, Artificial Sequence
  chemically synthesized
caccccacaaaaacacagagtg

SEQ ID NO: 42312 - DNA, 22 bp, Artificial Sequence
  chemically synthesized
accccacaaaaacacagagtgc

SEQ ID NO: 42313 - DNA, 22 bp, Artificial Sequence
  chemically synthesized
aactgagttcgaggtgcctgca

SEQ ID NO: 42314 - DNA, 22 bp, Artificial Sequence
  chemically synthesized
agttcgaggtgcctgcactgtg

SEQ ID NO: 42315 - DNA, 22 bp, Artificial Sequence
  chemically synthesized
gaggtgcctgcactgtgggccc

SEQ ID NO: 42316 - DNA, 22 bp, Artificial Sequence
  chemically synthesized
cactgtgggcccaagccaggag

SEQ ID NO: 42317 - DNA, 22 bp, Artificial Sequence
  chemically synthesized
tgggcccaagccaggagccttg

SEQ ID NO: 42318 - DNA, 22 bp, Artificial Sequence
  chemically synthesized
gcctggtgaagagtagcaggtg

SEQ ID NO: 42319 - DNA, 22 bp, Artificial Sequence
  chemically synthesized
cctggtgaagagtagcaggtga

SEQ ID NO: 42320 - DNA, 22 bp, Artificial Sequence
  chemically synthesized
gtgaagagtagcaggtgaaagc

SEQ ID NO: 42321 - DNA, 22 bp, Artificial Sequence
  chemically synthesized
acaagaaagagaaactggaatt

SEQ ID NO: 42322 - DNA, 22 bp, Artificial Sequence
  chemically synthesized
gaattctttccctgctgtgtgc

SEQ ID NO: 42323 - DNA, 22 bp, Artificial Sequence
  chemically synthesized
tttccctgctgtgtgctggagg

SEQ ID NO: 42324 - DNA, 22 bp, Artificial Sequence
  chemically synthesized
tccctgctgtgtgctggaggtg

SEQ ID NO: 42325 - DNA, 22 bp, Artificial Sequence
  chemically synthesized
ccctgctgtgtgctggaggtgt

SEQ ID NO: 42326 - DNA, 22 bp, Artificial Sequence
  chemically synthesized
cctgctgtgtgctggaggtgtc

SEQ ID NO: 42327 - DNA, 22 bp, Artificial Sequence
  chemically synthesized
ctgtgtgctggaggtgtcaggg

SEQ ID NO: 42328 - DNA, 22 bp, Artificial Sequence
  chemically synthesized
tgtgctggaggtgtcagggaag

SEQ ID NO: 42329 - DNA, 22 bp, Artificial Sequence
  chemically synthesized
gaggtgtcagggaagtggccag

SEQ ID NO: 42330 - DNA, 22 bp, Artificial Sequence
  chemically synthesized
ctttctcaagcccaagggcatt

SEQ ID NO: 42331 - DNA, 22 bp, Artificial Sequence
  chemically synthesized
tttctcaagcccaagggcatta

SEQ ID NO: 42332 - DNA, 22 bp, Artificial Sequence
  chemically synthesized
tctcaagcccaagggcattaac

SEQ ID NO: 42333 - DNA, 22 bp, Artificial Sequence
  chemically synthesized
ctcaagcccaagggcattaacg

SEQ ID NO: 42334 - DNA, 22 bp, Artificial Sequence
  chemically synthesized
tcaagcccaagggcattaacgg

SEQ ID NO: 42335 - DNA, 22 bp, Artificial Sequence
  chemically synthesized
aagcccaagggcattaacggtg

SEQ ID NO: 42336 - DNA, 22 bp, Artificial Sequence
  chemically synthesized
acggtggtactgctgcagctga

SEQ ID NO: 42337 - DNA, 22 bp, Artificial Sequence
  chemically synthesized
ctgcagctgaaatggcagaggg

SEQ ID NO: 42338 - DNA, 22 bp, Artificial Sequence
  chemically synthesized
cagctgaaatggcagaggggct

SEQ ID NO: 42339 - DNA, 22 bp, Artificial Sequence
  chemically synthesized
aaatggcagaggggctgtgggt

SEQ ID NO: 42340 - DNA, 22 bp, Artificial Sequence
  chemically synthesized
tgggttgtctcttggatttcct

SEQ ID NO: 42341 - DNA, 22 bp, Artificial Sequence
  chemically synthesized
tctcttggatttcctccccaga

SEQ ID NO: 42342 - DNA, 22 bp, Artificial Sequence
  chemically synthesized
ttggatttcctccccagagaag

SEQ ID NO: 42343 - DNA, 22 bp, Artificial Sequence
  chemically synthesized
ggatttcctccccagagaagca

SEQ ID NO: 42344 - DNA, 22 bp, Artificial Sequence
  chemically synthesized
gatttcctccccagagaagcac

SEQ ID NO: 42345 - DNA, 22 bp, Artificial Sequence
  chemically synthesized
cctccccagagaagcacagagc

SEQ ID NO: 42346 - DNA, 22 bp, Artificial Sequence
  chemically synthesized
ctccccagagaagcacagagcc

SEQ ID NO: 42347 - DNA, 22 bp, Artificial Sequence
  chemically synthesized
cccagagaagcacagagccaac

SEQ ID NO: 42348 - DNA, 22 bp, Artificial Sequence
  chemically synthesized
actaaaatgttcaggcagggcc

SEQ ID NO: 42349 - DNA, 22 bp, Artificial Sequence
  chemically synthesized
aaatgttcaggcagggccaggg

SEQ ID NO: 42350 - DNA, 22 bp, Artificial Sequence
  chemically synthesized
aggcagggccagggtggctgtg

SEQ ID NO: 42351 - DNA, 22 bp, Artificial Sequence
  chemically synthesized
tgctctgcccagtgaggaatag

SEQ ID NO: 42352 - DNA, 22 bp, Artificial Sequence
  chemically synthesized
tgcccagtgaggaatagtaggg

SEQ ID NO: 42353 - DNA, 22 bp, Artificial Sequence
  chemically synthesized
cccagtgaggaatagtaggggc

SEQ ID NO: 42354 - DNA, 22 bp, Artificial Sequence
  chemically synthesized
ttccataaggcagctacactgt

SEQ ID NO: 42355 - DNA, 22 bp, Artificial Sequence
  chemically synthesized
tccataaggcagctacactgtg

SEQ ID NO: 42356 - DNA, 22 bp, Artificial Sequence
  chemically synthesized
ccataaggcagctacactgtgc

SEQ ID NO: 42357 - DNA, 22 bp, Artificial Sequence
  chemically synthesized
cataaggcagctacactgtgct

SEQ ID NO: 42358 - DNA, 22 bp, Artificial Sequence
  chemically synthesized
cactgtgctggaggtccgtgag

SEQ ID NO: 42359 - DNA, 22 bp, Artificial Sequence
  chemically synthesized
tgctggaggtccgtgagagtcc

SEQ ID NO: 42360 - DNA, 22 bp, Artificial Sequence
  chemically synthesized
gaggtccgtgagagtcctgaag

SEQ ID NO: 42361 - DNA, 22 bp, Artificial Sequence
  chemically synthesized
aagctcctcgctccctcctgag

SEQ ID NO: 42362 - DNA, 22 bp, Artificial Sequence
  chemically synthesized
ctcgctccctcctgagcccata

SEQ ID NO: 42363 - DNA, 22 bp, Artificial Sequence
  chemically synthesized
gctccctcctgagcccatactt

SEQ ID NO: 42364 - DNA, 22 bp, Artificial Sequence
  chemically synthesized
cctcctgagcccatactttaat

SEQ ID NO: 42365 - DNA, 22 bp, Artificial Sequence
  chemically synthesized
ctgagcccatactttaatctca

SEQ ID NO: 42366 - DNA, 22 bp, Artificial Sequence
  chemically synthesized
agcccatactttaatctcaaga

SEQ ID NO: 42367 - DNA, 22 bp, Artificial Sequence
  chemically synthesized
taatctcaagagtttgagataa

SEQ ID NO: 42368 - DNA, 22 bp, Artificial Sequence
  chemically synthesized
aatctcaagagtttgagataaa

SEQ ID NO: 42369 - DNA, 22 bp, Artificial Sequence
  chemically synthesized
atctcaagagtttgagataaac

SEQ ID NO: 42370 - DNA, 22 bp, Artificial Sequence
  chemically synthesized
aagagtttgagataaacagtgg

SEQ ID NO: 42371 - DNA, 22 bp, Artificial Sequence
  chemically synthesized
gagataaacagtggtaaggaag

SEQ ID NO: 42372 - DNA, 22 bp, Artificial Sequence
  chemically synthesized
agataaacagtggtaaggaaga

SEQ ID NO: 42373 - DNA, 22 bp, Artificial Sequence
  chemically synthesized
atgaaacccaggaagataagtc

SEQ ID NO: 42374 - DNA, 22 bp, Artificial Sequence
  chemically synthesized
caacctaaagaaatacttttta

SEQ ID NO: 42375 - DNA, 22 bp, Artificial Sequence
  chemically synthesized
aagaaatactttttaaaaatca

SEQ ID NO: 42376 - DNA, 22 bp, Artificial Sequence
  chemically synthesized
tttaaaaatcatatttatagag

SEQ ID NO: 42377 - DNA, 22 bp, Artificial Sequence
  chemically synthesized
ttaaaaatcatatttatagagg

SEQ ID NO: 42378 - DNA, 22 bp, Artificial Sequence
  chemically synthesized
taaaaatcatatttatagaggt

SEQ ID NO: 42379 - DNA, 22 bp, Artificial Sequence
  chemically synthesized
aaaaatcatatttatagaggtt

SEQ ID NO: 42380 - DNA, 22 bp, Artificial Sequence
  chemically synthesized
aaaatcatatttatagaggttt

SEQ ID NO: 42381 - DNA, 22 bp, Artificial Sequence
  chemically synthesized
atagaggtttgcagtgatacta

SEQ ID NO: 42382 - DNA, 22 bp, Artificial Sequence
  chemically synthesized
tagaggtttgcagtgatactaa

SEQ ID NO: 42383 - DNA, 22 bp, Artificial Sequence
  chemically synthesized
gcagtgatactaaagacaatat

SEQ ID NO: 42384 - DNA, 22 bp, Artificial Sequence
  chemically synthesized
cagtgatactaaagacaatatt

SEQ ID NO: 42385 - DNA, 22 bp, Artificial Sequence
  chemically synthesized
aagacaatattgcaaatcatta

SEQ ID NO: 42386 - DNA, 22 bp, Artificial Sequence
  chemically synthesized
caaatcattattaagaatacaa

SEQ ID NO: 42387 - DNA, 22 bp, Artificial Sequence
  chemically synthesized
ttaagaatacaagaagtacaat

SEQ ID NO: 42388 - DNA, 22 bp, Artificial Sequence
  chemically synthesized
agaatacaagaagtacaatgtt

SEQ ID NO: 42389 - DNA, 22 bp, Artificial Sequence
  chemically synthesized
cttgtttctttaacacctgtga

SEQ ID NO: 42390 - DNA, 22 bp, Artificial Sequence
  chemically synthesized
ttgtttctttaacacctgtgat

SEQ ID NO: 42391 - DNA, 22 bp, Artificial Sequence
  chemically synthesized
gtttctttaacacctgtgatac

SEQ ID NO: 42392 - DNA, 22 bp, Artificial Sequence
  chemically synthesized
tttctttaacacctgtgataca

SEQ ID NO: 42393 - DNA, 22 bp, Artificial Sequence
  chemically synthesized
ctttaacacctgtgatacaggt

SEQ ID NO: 42394 - DNA, 22 bp, Artificial Sequence
  chemically synthesized
tttaacacctgtgatacaggtg

SEQ ID NO: 42395 - DNA, 22 bp, Artificial Sequence
  chemically synthesized
taacacctgtgatacaggtgtt

SEQ ID NO: 42396 - DNA, 22 bp, Artificial Sequence
  chemically synthesized
aacacctgtgatacaggtgttt

SEQ ID NO: 42397 - DNA, 22 bp, Artificial Sequence
  chemically synthesized
acacctgtgatacaggtgtttg

SEQ ID NO: 42398 - DNA, 22 bp, Artificial Sequence
  chemically synthesized
tgatacaggtgtttgatatgaa

SEQ ID NO: 42399 - DNA, 22 bp, Artificial Sequence
  chemically synthesized
gatatgaattctacgtaatggc

SEQ ID NO: 42400 - DNA, 22 bp, Artificial Sequence
  chemically synthesized
atatgaattctacgtaatggct

SEQ ID NO: 42401 - DNA, 22 bp, Artificial Sequence
  chemically synthesized
tacgtaatggctgcattgcttc

SEQ ID NO: 42402 - DNA, 22 bp, Artificial Sequence
  chemically synthesized
cgtaatggctgcattgcttctt

SEQ ID NO: 42403 - DNA, 22 bp, Artificial Sequence
  chemically synthesized
cattgcttcttgccaccaccca

SEQ ID NO: 42404 - DNA, 22 bp, Artificial Sequence
  chemically synthesized
cttcttgccaccacccaaagaa

SEQ ID NO: 42405 - DNA, 22 bp, Artificial Sequence
  chemically synthesized
cttgccaccacccaaagaaggt

SEQ ID NO: 42406 - DNA, 22 bp, Artificial Sequence
  chemically synthesized
ttgccaccacccaaagaaggtt

SEQ ID NO: 42407 - DNA, 22 bp, Artificial Sequence
  chemically synthesized
gccaccacccaaagaaggttgt

SEQ ID NO: 42408 - DNA, 22 bp, Artificial Sequence
  chemically synthesized
ccaccacccaaagaaggttgta

SEQ ID NO: 42409 - DNA, 22 bp, Artificial Sequence
  chemically synthesized
tatagcactcagatgtatacta

SEQ ID NO: 42410 - DNA, 22 bp, Artificial Sequence
  chemically synthesized
agatgtatactaactgcaaccg

SEQ ID NO: 42411 - DNA, 22 bp, Artificial Sequence
  chemically synthesized
actgcaaccgtgtatctcttag

SEQ ID NO: 42412 - DNA, 22 bp, Artificial Sequence
  chemically synthesized
caaccgtgtatctcttaggaat

SEQ ID NO: 42413 - DNA, 22 bp, Artificial Sequence
  chemically synthesized
ttaggaatttctcctttgccct

SEQ ID NO: 42414 - DNA, 22 bp, Artificial Sequence
  chemically synthesized
aggaatttctcctttgccctct

SEQ ID NO: 42415 - DNA, 22 bp, Artificial Sequence
  chemically synthesized
ggaatttctcctttgccctctt

SEQ ID NO: 42416 - DNA, 22 bp, Artificial Sequence
  chemically synthesized
ctcctttgccctcttccctccc

SEQ ID NO: 42417 - DNA, 22 bp, Artificial Sequence
  chemically synthesized
tcctttgccctcttccctccct

SEQ ID NO: 42418 - DNA, 22 bp, Artificial Sequence
  chemically synthesized
ctttgccctcttccctccctat

SEQ ID NO: 42419 - DNA, 22 bp, Artificial Sequence
  chemically synthesized
tgccctcttccctccctatcag

SEQ ID NO: 42420 - DNA, 22 bp, Artificial Sequence
  chemically synthesized
gccctcttccctccctatcagc

SEQ ID NO: 42421 - DNA, 22 bp, Artificial Sequence
  chemically synthesized
ccctcttccctccctatcagca

SEQ ID NO: 42422 - DNA, 22 bp, Artificial Sequence
  chemically synthesized
ttccctccctatcagcatgtat

SEQ ID NO: 42423 - DNA, 22 bp, Artificial Sequence
  chemically synthesized
ccctccctatcagcatgtatct

SEQ ID NO: 42424 - DNA, 22 bp, Artificial Sequence
  chemically synthesized
cctccctatcagcatgtatcta

SEQ ID NO: 42425 - DNA, 22 bp, Artificial Sequence
  chemically synthesized
cctatcagcatgtatctagcag

SEQ ID NO: 42426 - DNA, 22 bp, Artificial Sequence
  chemically synthesized
tcagcatgtatctagcagcatt

SEQ ID NO: 42427 - DNA, 22 bp, Artificial Sequence
  chemically synthesized
gcagcattctgaaaagttaact

SEQ ID NO: 42428 - DNA, 22 bp, Artificial Sequence
  chemically synthesized
tgaaaagttaactgcacagtga

SEQ ID NO: 42429 - DNA, 22 bp, Artificial Sequence
  chemically synthesized
aaaagttaactgcacagtgagc

SEQ ID NO: 42430 - DNA, 22 bp, Artificial Sequence
  chemically synthesized
actgcacagtgagcgactgctg

SEQ ID NO: 42431 - DNA, 22 bp, Artificial Sequence
  chemically synthesized
cacagtgagcgactgctgggca

SEQ ID NO: 42432 - DNA, 22 bp, Artificial Sequence
  chemically synthesized
ctgggcatcttaaggggcattc

SEQ ID NO: 42433 - DNA, 22 bp, Artificial Sequence
  chemically synthesized
ggcatcttaaggggcattcttt

SEQ ID NO: 42434 - DNA, 22 bp, Artificial Sequence
  chemically synthesized
aaggggcattcttttctaccta

SEQ ID NO: 42435 - DNA, 22 bp, Artificial Sequence
  chemically synthesized
aggggcattcttttctacctag

SEQ ID NO: 42436 - DNA, 22 bp, Artificial Sequence
  chemically synthesized
ttttctacctaggtattccccc

SEQ ID NO: 42437 - DNA, 22 bp, Artificial Sequence
  chemically synthesized
ttctacctaggtattccccctc

SEQ ID NO: 42438 - DNA, 22 bp, Artificial Sequence
  chemically synthesized
tctacctaggtattccccctcc

SEQ ID NO: 42439 - DNA, 22 bp, Artificial Sequence
  chemically synthesized
ctacctaggtattccccctcct

SEQ ID NO: 42440 - DNA, 22 bp, Artificial Sequence
  chemically synthesized
tacctaggtattccccctcctc

SEQ ID NO: 42441 - DNA, 22 bp, Artificial Sequence
  chemically synthesized
cctaggtattccccctcctcca

SEQ ID NO: 42442 - DNA, 22 bp, Artificial Sequence
  chemically synthesized
ggtattccccctcctccactca

SEQ ID NO: 42443 - DNA, 22 bp, Artificial Sequence
  chemically synthesized
cccctcctccactcatgtctag

SEQ ID NO: 42444 - DNA, 22 bp, Artificial Sequence
  chemically synthesized
ctccactcatgtctagcatgca

SEQ ID NO: 42445 - DNA, 22 bp, Artificial Sequence
  chemically synthesized
cactcatgtctagcatgcagga

SEQ ID NO: 42446 - DNA, 22 bp, Artificial Sequence
  chemically synthesized
atgtctagcatgcaggacttgg

SEQ ID NO: 42447 - DNA, 22 bp, Artificial Sequence
  chemically synthesized
gcatgcaggacttgggtaatct

SEQ ID NO: 42448 - DNA, 22 bp, Artificial Sequence
  chemically synthesized
gggtaatctctggggtttcaga

SEQ ID NO: 42449 - DNA, 22 bp, Artificial Sequence
  chemically synthesized
ggtaatctctggggtttcagat

SEQ ID NO: 42450 - DNA, 22 bp, Artificial Sequence
  chemically synthesized
tggggtttcagattctccagac

SEQ ID NO: 42451 - DNA, 22 bp, Artificial Sequence
  chemically synthesized
gggtttcagattctccagacct

SEQ ID NO: 42452 - DNA, 22 bp, Artificial Sequence
  chemically synthesized
cagattctccagacctccattc

SEQ ID NO: 42453 - DNA, 22 bp, Artificial Sequence
  chemically synthesized
agattctccagacctccattct

SEQ ID NO: 42454 - DNA, 22 bp, Artificial Sequence
  chemically synthesized
tccagacctccattctctcagg

SEQ ID NO: 42455 - DNA, 22 bp, Artificial Sequence
  chemically synthesized
cagacctccattctctcagggg

SEQ ID NO: 42456 - DNA, 22 bp, Artificial Sequence
  chemically synthesized
cattctctcaggggcttccacc

SEQ ID NO: 42457 - DNA, 22 bp, Artificial Sequence
  chemically synthesized
tctcaggggcttccacctcctg

SEQ ID NO: 42458 - DNA, 22 bp, Artificial Sequence
  chemically synthesized
tcaggggcttccacctcctgct

SEQ ID NO: 42459 - DNA, 22 bp, Artificial Sequence
  chemically synthesized
aggggcttccacctcctgctca

SEQ ID NO: 42460 - DNA, 22 bp, Artificial Sequence
  chemically synthesized
ccacctcctgctcatatctagc

SEQ ID NO: 42461 - DNA, 22 bp, Artificial Sequence
  chemically synthesized
cacctcctgctcatatctagct

SEQ ID NO: 42462 - DNA, 22 bp, Artificial Sequence
  chemically synthesized
ctgctcatatctagctatctgc

SEQ ID NO: 42463 - DNA, 22 bp, Artificial Sequence
  chemically synthesized
ctcatatctagctatctgccta

SEQ ID NO: 42464 - DNA, 22 bp, Artificial Sequence
  chemically synthesized
atatctagctatctgcctagtc

SEQ ID NO: 42465 - DNA, 22 bp, Artificial Sequence
  chemically synthesized
gctatctgcctagtctaaccat

SEQ ID NO: 42466 - DNA, 22 bp, Artificial Sequence
  chemically synthesized
tctgcctagtctaaccataaaa

SEQ ID NO: 42467 - DNA, 22 bp, Artificial Sequence
  chemically synthesized
cctagtctaaccataaaatctt

SEQ ID NO: 42468 - DNA, 22 bp, Artificial Sequence
  chemically synthesized
gtctaaccataaaatcttaaat

SEQ ID NO: 42469 - DNA, 22 bp, Artificial Sequence
  chemically synthesized
accataaaatcttaaataagaa

SEQ ID NO: 42470 - DNA, 22 bp, Artificial Sequence
  chemically synthesized
aaataagaataaatcatgtttg

SEQ ID NO: 42471 - DNA, 22 bp, Artificial Sequence
  chemically synthesized
aataagaataaatcatgtttgc

SEQ ID NO: 42472 - DNA, 22 bp, Artificial Sequence
  chemically synthesized
gctcttgattgccatgtcatga

SEQ ID NO: 42473 - DNA, 22 bp, Artificial Sequence
  chemically synthesized
ctcttgattgccatgtcatgat

SEQ ID NO: 42474 - DNA, 22 bp, Artificial Sequence
  chemically synthesized
ttgattgccatgtcatgataaa

SEQ ID NO: 42475 - DNA, 22 bp, Artificial Sequence
  chemically synthesized
gattgccatgtcatgataaaaa

SEQ ID NO: 42476 - DNA, 22 bp, Artificial Sequence
  chemically synthesized
attgccatgtcatgataaaaaa

SEQ ID NO: 42477 - DNA, 22 bp, Artificial Sequence
  chemically synthesized
ccatgtcatgataaaaaaaata

SEQ ID NO: 42478 - DNA, 22 bp, Artificial Sequence
  chemically synthesized
tgttgccaagattgatgttgat

SEQ ID NO: 42479 - DNA, 22 bp, Artificial Sequence
  chemically synthesized
ccaagattgatgttgatctgct

SEQ ID NO: 42480 - DNA, 22 bp, Artificial Sequence
  chemically synthesized
atgttgatctgctaatccctgt

SEQ ID NO: 42481 - DNA, 22 bp, Artificial Sequence
  chemically synthesized
atctgctaatccctgtgtagaa

SEQ ID NO: 42482 - DNA, 22 bp, Artificial Sequence
  chemically synthesized
ctaatccctgtgtagaaatgaa

SEQ ID NO: 42483 - DNA, 22 bp, Artificial Sequence
  chemically synthesized
atccctgtgtagaaatgaacct

SEQ ID NO: 42484 - DNA, 22 bp, Artificial Sequence
  chemically synthesized
tgtagaaatgaaccttggaggc

SEQ ID NO: 42485 - DNA, 22 bp, Artificial Sequence
  chemically synthesized
ggaggccattgtttgatttctt

SEQ ID NO: 42486 - DNA, 22 bp, Artificial Sequence
  chemically synthesized
gaggccattgtttgatttctta

SEQ ID NO: 42487 - DNA, 22 bp, Artificial Sequence
  chemically synthesized
tttgatttcttacaatatgtgc

SEQ ID NO: 42488 - DNA, 22 bp, Artificial Sequence
  chemically synthesized
gatttcttacaatatgtgcatt

SEQ ID NO: 42489 - DNA, 22 bp, Artificial Sequence
  chemically synthesized
atttcttacaatatgtgcattg

SEQ ID NO: 42490 - DNA, 22 bp, Artificial Sequence
  chemically synthesized
cttacaatatgtgcattggttg

SEQ ID NO: 42491 - DNA, 22 bp, Artificial Sequence
  chemically synthesized
ttacaatatgtgcattggttgt

SEQ ID NO: 42492 - DNA, 22 bp, Artificial Sequence
  chemically synthesized
acaatatgtgcattggttgtaa

SEQ ID NO: 42493 - DNA, 22 bp, Artificial Sequence
  chemically synthesized
caatatgtgcattggttgtaac

SEQ ID NO: 42494 - DNA, 22 bp, Artificial Sequence
  chemically synthesized
gttgtaacactgtcactttgac

SEQ ID NO: 42495 - DNA, 22 bp, Artificial Sequence
  chemically synthesized
taacactgtcactttgacagtt

SEQ ID NO: 42496 - DNA, 22 bp, Artificial Sequence
  chemically synthesized
tcactttgacagttgataagca

SEQ ID NO: 42497 - DNA, 22 bp, Artificial Sequence
  chemically synthesized
tgacagttgataagcatcttct

SEQ ID NO: 42498 - DNA, 22 bp, Artificial Sequence
  chemically synthesized
gacagttgataagcatcttctg

SEQ ID NO: 42499 - DNA, 22 bp, Artificial Sequence
  chemically synthesized
acagttgataagcatcttctga

SEQ ID NO: 42500 - DNA, 22 bp, Artificial Sequence
  chemically synthesized
ataagcatcttctgaatggtcc

SEQ ID NO: 42501 - DNA, 22 bp, Artificial Sequence
  chemically synthesized
ctgaatggtccctcctttagtt

SEQ ID NO: 42502 - DNA, 22 bp, Artificial Sequence
  chemically synthesized
tgaatggtccctcctttagtta

SEQ ID NO: 42503 - DNA, 22 bp, Artificial Sequence
  chemically synthesized
aatggtccctcctttagttaca

SEQ ID NO: 42504 - DNA, 22 bp, Artificial Sequence
  chemically synthesized
ctttagttacaaaaatgttggt

SEQ ID NO: 42505 - DNA, 22 bp, Artificial Sequence
  chemically synthesized
tagttacaaaaatgttggtgca

SEQ ID NO: 42506 - DNA, 22 bp, Artificial Sequence
  chemically synthesized
agttacaaaaatgttggtgcat

SEQ ID NO: 42507 - DNA, 22 bp, Artificial Sequence
  chemically synthesized
gttacaaaaatgttggtgcatg

SEQ ID NO: 42508 - DNA, 22 bp, Artificial Sequence
  chemically synthesized
caaaaatgttggtgcatggatg

SEQ ID NO: 42509 - DNA, 22 bp, Artificial Sequence
  chemically synthesized
gtgcatggatgatgttgggaat

SEQ ID NO: 42510 - DNA, 22 bp, Artificial Sequence
  chemically synthesized
ggaataaataaaaagtgaacta

SEQ ID NO: 42511 - DNA, 22 bp, Artificial Sequence
  chemically synthesized
aattatgttctcatcttgggca

SEQ ID NO: 42512 - DNA, 22 bp, Artificial Sequence
  chemically synthesized
tgttctcatcttgggcaaaaat

SEQ ID NO: 42513 - DNA, 22 bp, Artificial Sequence
  chemically synthesized
tcatcttgggcaaaaattaagc

SEQ ID NO: 42514 - DNA, 22 bp, Artificial Sequence
  chemically synthesized
atcttgggcaaaaattaagcaa

SEQ ID NO: 42515 - DNA, 22 bp, Artificial Sequence
  chemically synthesized
gggcaaaaattaagcaaaaaaa

SEQ ID NO: 42516 - DNA, 22 bp, Artificial Sequence
  chemically synthesized
ggcaaaaattaagcaaaaaaaa

SEQ ID NO: 42517 - DNA, 22 bp, Artificial Sequence
  chemically synthesized
agcaaaaaaaaaatggaggata

SEQ ID NO: 42518 - DNA, 22 bp, Artificial Sequence
  chemically synthesized
ctccacaaagaaggccattttt

SEQ ID NO: 42519 - DNA, 22 bp, Artificial Sequence
  chemically synthesized
cacaaagaaggccatttttgta

SEQ ID NO: 42520 - DNA, 22 bp, Artificial Sequence
  chemically synthesized
ttgtactaggcttactacagtg

SEQ ID NO: 42521 - DNA, 22 bp, Artificial Sequence
  chemically synthesized
tgtactaggcttactacagtga

SEQ ID NO: 42522 - DNA, 22 bp, Artificial Sequence
  chemically synthesized
gtactaggcttactacagtgac

SEQ ID NO: 42523 - DNA, 22 bp, Artificial Sequence
  chemically synthesized
tactaggcttactacagtgaca

SEQ ID NO: 42524 - DNA, 22 bp, Artificial Sequence
  chemically synthesized
ggcttactacagtgacacacca

SEQ ID NO: 42525 - DNA, 22 bp, Artificial Sequence
  chemically synthesized
actacagtgacacaccactatt

SEQ ID NO: 42526 - DNA, 22 bp, Artificial Sequence
  chemically synthesized
ctacagtgacacaccactatta

SEQ ID NO: 42527 - DNA, 22 bp, Artificial Sequence
  chemically synthesized
cagtgacacaccactattagtt

SEQ ID NO: 42528 - DNA, 22 bp, Artificial Sequence
  chemically synthesized
ttagttggggagaattcagttt

SEQ ID NO: 42529 - DNA, 22 bp, Artificial Sequence
  chemically synthesized
gttggggagaattcagtttttc

SEQ ID NO: 42530 - DNA, 22 bp, Artificial Sequence
  chemically synthesized
gggagaattcagtttttccaag

SEQ ID NO: 42531 - DNA, 22 bp, Artificial Sequence
  chemically synthesized
agtttttccaaggtgttgatag

SEQ ID NO: 42532 - DNA, 22 bp, Artificial Sequence
  chemically synthesized
ttccaaggtgttgataggcatc

SEQ ID NO: 42533 - DNA, 22 bp, Artificial Sequence
  chemically synthesized
tccaaggtgttgataggcatcc

SEQ ID NO: 42534 - DNA, 22 bp, Artificial Sequence
  chemically synthesized
ccaaggtgttgataggcatcca

SEQ ID NO: 42535 - DNA, 22 bp, Artificial Sequence
  chemically synthesized
caaggtgttgataggcatccag

SEQ ID NO: 42536 - DNA, 22 bp, Artificial Sequence
  chemically synthesized
ataggcatccagatttcagagg

SEQ ID NO: 42537 - DNA, 22 bp, Artificial Sequence
  chemically synthesized
cagaggaaattgtaaaaaagca

SEQ ID NO: 42538 - DNA, 22 bp, Artificial Sequence
  chemically synthesized
agaggaaattgtaaaaaagcag

SEQ ID NO: 42539 - DNA, 22 bp, Artificial Sequence
  chemically synthesized
taaaaaagcagaacctgggacc

SEQ ID NO: 42540 - DNA, 22 bp, Artificial Sequence
  chemically synthesized
ggaccaatactgcccacgattt

SEQ ID NO: 42541 - DNA, 22 bp, Artificial Sequence
  chemically synthesized
cccacgatttttctttgagatc

SEQ ID NO: 42542 - DNA, 22 bp, Artificial Sequence
  chemically synthesized
ttctttgagatcaaatctgagg

SEQ ID NO: 42543 - DNA, 22 bp, Artificial Sequence
  chemically synthesized
tctttgagatcaaatctgaggc

SEQ ID NO: 42544 - DNA, 22 bp, Artificial Sequence
  chemically synthesized
ctttgagatcaaatctgaggca

SEQ ID NO: 42545 - DNA, 22 bp, Artificial Sequence
  chemically synthesized
tttgagatcaaatctgaggcaa

SEQ ID NO: 42546 - DNA, 22 bp, Artificial Sequence
  chemically synthesized
tgagatcaaatctgaggcaaca

SEQ ID NO: 42547 - DNA, 22 bp, Artificial Sequence
  chemically synthesized
gagatcaaatctgaggcaacaa

SEQ ID NO: 42548 - DNA, 22 bp, Artificial Sequence
  chemically synthesized
agatcaaatctgaggcaacaaa

SEQ ID NO: 42549 - DNA, 22 bp, Artificial Sequence
  chemically synthesized
aggcaacaaatctgttcaaaag

SEQ ID NO: 42550 - DNA, 22 bp, Artificial Sequence
  chemically synthesized
ttcaaaagctgctttctgcctg

SEQ ID NO: 42551 - DNA, 22 bp, Artificial Sequence
  chemically synthesized
aaaagctgctttctgcctggtt

SEQ ID NO: 42552 - DNA, 22 bp, Artificial Sequence
  chemically synthesized
ctttctgcctggttgtggcaaa

SEQ ID NO: 42553 - DNA, 22 bp, Artificial Sequence
  chemically synthesized
tctgcctggttgtggcaaaggg

SEQ ID NO: 42554 - DNA, 22 bp, Artificial Sequence
  chemically synthesized
ctgcctggttgtggcaaagggt

SEQ ID NO: 42555 - DNA, 22 bp, Artificial Sequence
  chemically synthesized
tgcctggttgtggcaaagggtg

SEQ ID NO: 42556 - DNA, 22 bp, Artificial Sequence
  chemically synthesized
cctggttgtggcaaagggtggc

SEQ ID NO: 42557 - DNA, 22 bp, Artificial Sequence
  chemically synthesized
gttgtggcaaagggtggccaag

SEQ ID NO: 42558 - DNA, 22 bp, Artificial Sequence
  chemically synthesized
tggcaaagggtggccaagtggg

SEQ ID NO: 42559 - DNA, 22 bp, Artificial Sequence
  chemically synthesized
agctgtgttcccattgcaaggc

SEQ ID NO: 42560 - DNA, 22 bp, Artificial Sequence
  chemically synthesized
tgttcccattgcaaggctactg

SEQ ID NO: 42561 - DNA, 22 bp, Artificial Sequence
  chemically synthesized
ccattgcaaggctactgagcat

SEQ ID NO: 42562 - DNA, 22 bp, Artificial Sequence
  chemically synthesized
caaggctactgagcatcccctg

SEQ ID NO: 42563 - DNA, 22 bp, Artificial Sequence
  chemically synthesized
ctgagcatcccctgtcctgagg

SEQ ID NO: 42564 - DNA, 22 bp, Artificial Sequence
  chemically synthesized
agcatcccctgtcctgaggctc

SEQ ID NO: 42565 - DNA, 22 bp, Artificial Sequence
  chemically synthesized
tcctgaggctccttaggacacc

SEQ ID NO: 42566 - DNA, 22 bp, Artificial Sequence
  chemically synthesized
aggctccttaggacacctggct

SEQ ID NO: 42567 - DNA, 22 bp, Artificial Sequence
  chemically synthesized
cttaggacacctggctgagctt

SEQ ID NO: 42568 - DNA, 22 bp, Artificial Sequence
  chemically synthesized
aggacacctggctgagcttcag

SEQ ID NO: 42569 - DNA, 22 bp, Artificial Sequence
  chemically synthesized
ggacacctggctgagcttcagc

SEQ ID NO: 42570 - DNA, 22 bp, Artificial Sequence
  chemically synthesized
gctgagcttcagcagccctctt

SEQ ID NO: 42571 - DNA, 22 bp, Artificial Sequence
  chemically synthesized
agcttcagcagccctcttccaa

SEQ ID NO: 42572 - DNA, 22 bp, Artificial Sequence
  chemically synthesized
cagcagccctcttccaagcctg

SEQ ID NO: 42573 - DNA, 22 bp, Artificial Sequence
  chemically synthesized
agcagccctcttccaagcctgg

SEQ ID NO: 42574 - DNA, 22 bp, Artificial Sequence
  chemically synthesized
ttccaagcctggagatgccagc

SEQ ID NO: 42575 - DNA, 22 bp, Artificial Sequence
  chemically synthesized
ccaagcctggagatgccagctc

SEQ ID NO: 42576 - DNA, 22 bp, Artificial Sequence
  chemically synthesized
caagcctggagatgccagctcc

SEQ ID NO: 42577 - DNA, 22 bp, Artificial Sequence
  chemically synthesized
gagatgccagctccatctctgg

SEQ ID NO: 42578 - DNA, 22 bp, Artificial Sequence
  chemically synthesized
catctctggcacaaaatgtagt

SEQ ID NO: 42579 - DNA, 22 bp, Artificial Sequence
  chemically synthesized
tggcacaaaatgtagtgatttt

SEQ ID NO: 42580 - DNA, 22 bp, Artificial Sequence
  chemically synthesized
gcacaaaatgtagtgattttca

SEQ ID NO: 42581 - DNA, 22 bp, Artificial Sequence
  chemically synthesized
tcacagggtgagaggccaaaag

SEQ ID NO: 42582 - DNA, 22 bp, Artificial Sequence
  chemically synthesized
cacagggtgagaggccaaaaga

SEQ ID NO: 42583 - DNA, 22 bp, Artificial Sequence
  chemically synthesized
acagggtgagaggccaaaagag

SEQ ID NO: 42584 - DNA, 22 bp, Artificial Sequence
  chemically synthesized
ataaaatgaagatagccaagct

SEQ ID NO: 42585 - DNA, 22 bp, Artificial Sequence
  chemically synthesized
ccatggaattaagcaacaggac

SEQ ID NO: 42586 - DNA, 22 bp, Artificial Sequence
  chemically synthesized
catggaattaagcaacaggaca

SEQ ID NO: 42587 - DNA, 22 bp, Artificial Sequence
  chemically synthesized
agcaacaggacaaccttgacca

SEQ ID NO: 42588 - DNA, 22 bp, Artificial Sequence
  chemically synthesized
gaccactttgaggggtgtggtg

SEQ ID NO: 42589 - DNA, 22 bp, Artificial Sequence
  chemically synthesized
accactttgaggggtgtggtgg

SEQ ID NO: 42590 - DNA, 22 bp, Artificial Sequence
  chemically synthesized
tgaggggtgtggtgggggccac

SEQ ID NO: 42591 - DNA, 22 bp, Artificial Sequence
  chemically synthesized
gaggggtgtggtgggggccaca

SEQ ID NO: 42592 - DNA, 22 bp, Artificial Sequence
  chemically synthesized
aggggtgtggtgggggccacat

SEQ ID NO: 42593 - DNA, 22 bp, Artificial Sequence
  chemically synthesized
aagagtgactagaagagcagtg

SEQ ID NO: 42594 - DNA, 22 bp, Artificial Sequence
  chemically synthesized
gaagagcagtgggggtggcagc

SEQ ID NO: 42595 - DNA, 22 bp, Artificial Sequence
  chemically synthesized
gctctgaaagcagcgagacttc

SEQ ID NO: 42596 - DNA, 22 bp, Artificial Sequence
  chemically synthesized
tgaaagcagcgagacttctagg

SEQ ID NO: 42597 - DNA, 22 bp, Artificial Sequence
  chemically synthesized
aaagcagcgagacttctaggga

SEQ ID NO: 42598 - DNA, 22 bp, Artificial Sequence
  chemically synthesized
ctagggaatacagggtcagggg

SEQ ID NO: 42599 - DNA, 22 bp, Artificial Sequence
  chemically synthesized
tagggaatacagggtcagggga

SEQ ID NO: 42600 - DNA, 22 bp, Artificial Sequence
  chemically synthesized
gggaatacagggtcaggggagg

SEQ ID NO: 42601 - DNA, 22 bp, Artificial Sequence
  chemically synthesized
tgaaagatgacacactgcagag

SEQ ID NO: 42602 - DNA, 22 bp, Artificial Sequence
  chemically synthesized
aaagatgacacactgcagagaa

SEQ ID NO: 42603 - DNA, 22 bp, Artificial Sequence
  chemically synthesized
cagagaacatgtgtttgtatgc

SEQ ID NO: 42604 - DNA, 22 bp, Artificial Sequence
  chemically synthesized
gtatgccgatgacaagtatcca

SEQ ID NO: 42605 - DNA, 22 bp, Artificial Sequence
  chemically synthesized
tatgccgatgacaagtatccag

SEQ ID NO: 42606 - DNA, 22 bp, Artificial Sequence
  chemically synthesized
tcattctcagaaaggcctgtcc

SEQ ID NO: 42607 - DNA, 22 bp, Artificial Sequence
  chemically synthesized
attctcagaaaggcctgtcctg

SEQ ID NO: 42608 - DNA, 22 bp, Artificial Sequence
  chemically synthesized
tcagaaaggcctgtcctgacct

SEQ ID NO: 42609 - DNA, 22 bp, Artificial Sequence
  chemically synthesized
agaaaggcctgtcctgacctcc

SEQ ID NO: 42610 - DNA, 22 bp, Artificial Sequence
  chemically synthesized
tcctgacctcctgagagtacac

SEQ ID NO: 42611 - DNA, 22 bp, Artificial Sequence
  chemically synthesized
acctcctgagagtacacagacc

SEQ ID NO: 42612 - DNA, 22 bp, Artificial Sequence
  chemically synthesized
ctgagagtacacagaccatgag

SEQ ID NO: 42613 - DNA, 22 bp, Artificial Sequence
  chemically synthesized
agagtacacagaccatgagggc

SEQ ID NO: 42614 - DNA, 22 bp, Artificial Sequence
  chemically synthesized
actgtttcatgcaaagtccttg

SEQ ID NO: 42615 - DNA, 22 bp, Artificial Sequence
  chemically synthesized
tttcatgcaaagtccttggcca

SEQ ID NO: 42616 - DNA, 22 bp, Artificial Sequence
  chemically synthesized
catgcaaagtccttggccacag

SEQ ID NO: 42617 - DNA, 22 bp, Artificial Sequence
  chemically synthesized
atgcaaagtccttggccacagt

SEQ ID NO: 42618 - DNA, 22 bp, Artificial Sequence
  chemically synthesized
ggccacagtccacctgctcccc

SEQ ID NO: 42619 - DNA, 22 bp, Artificial Sequence
  chemically synthesized
gccacagtccacctgctcccca

SEQ ID NO: 42620 - DNA, 22 bp, Artificial Sequence
  chemically synthesized
ctccccacctctgtgactttgt

SEQ ID NO: 42621 - DNA, 22 bp, Artificial Sequence
  chemically synthesized
cccacctctgtgactttgtcct

SEQ ID NO: 42622 - DNA, 22 bp, Artificial Sequence
  chemically synthesized
tgtgactttgtccttcctcaat

SEQ ID NO: 42623 - DNA, 22 bp, Artificial Sequence
  chemically synthesized
tgactttgtccttcctcaattt

SEQ ID NO: 42624 - DNA, 22 bp, Artificial Sequence
  chemically synthesized
tgtccttcctcaatttaatatg

SEQ ID NO: 42625 - DNA, 22 bp, Artificial Sequence
  chemically synthesized
gtccttcctcaatttaatatgc

SEQ ID NO: 42626 - DNA, 22 bp, Artificial Sequence
  chemically synthesized
tccttcctcaatttaatatgct

SEQ ID NO: 42627 - DNA, 22 bp, Artificial Sequence
  chemically synthesized
cctcaatttaatatgctctatg

SEQ ID NO: 42628 - DNA, 22 bp, Artificial Sequence
  chemically synthesized
ctcaatttaatatgctctatgc

SEQ ID NO: 42629 - DNA, 22 bp, Artificial Sequence
  chemically synthesized
aatttaatatgctctatgctgg

SEQ ID NO: 42630 - DNA, 22 bp, Artificial Sequence
  chemically synthesized
aatatgctctatgctggaaaac

SEQ ID NO: 42631 - DNA, 22 bp, Artificial Sequence
  chemically synthesized
atatgctctatgctggaaaact

SEQ ID NO: 42632 - DNA, 22 bp, Artificial Sequence
  chemically synthesized
tatgctggaaaactggattatt

SEQ ID NO: 42633 - DNA, 22 bp, Artificial Sequence
  chemically synthesized
tgctggaaaactggattattga

SEQ ID NO: 42634 - DNA, 22 bp, Artificial Sequence
  chemically synthesized
gaaaactggattattgaacagg

SEQ ID NO: 42635 - DNA, 22 bp, Artificial Sequence
  chemically synthesized
gattattgaacaggcattggct

SEQ ID NO: 42636 - DNA, 22 bp, Artificial Sequence
  chemically synthesized
ttgaacaggcattggctgatgc

SEQ ID NO: 42637 - DNA, 22 bp, Artificial Sequence
  chemically synthesized
aacaggcattggctgatgcatt

SEQ ID NO: 42638 - DNA, 22 bp, Artificial Sequence
  chemically synthesized
gctgatgcattctgaacctaat

SEQ ID NO: 42639 - DNA, 22 bp, Artificial Sequence
  chemically synthesized
atgcattctgaacctaatccac

SEQ ID NO: 42640 - DNA, 22 bp, Artificial Sequence
  chemically synthesized
tgaacctaatccactaaaaagc

SEQ ID NO: 42641 - DNA, 22 bp, Artificial Sequence
  chemically synthesized
aacctaatccactaaaaagcac

SEQ ID NO: 42642 - DNA, 22 bp, Artificial Sequence
  chemically synthesized
atccactaaaaagcacttgata

SEQ ID NO: 42643 - DNA, 22 bp, Artificial Sequence
  chemically synthesized
aaaagcacttgatagatatatc

SEQ ID NO: 42644 - DNA, 22 bp, Artificial Sequence
  chemically synthesized
gatagatatatcaaaatatcat

SEQ ID NO: 42645 - DNA, 22 bp, Artificial Sequence
  chemically synthesized
atagatatatcaaaatatcatt

SEQ ID NO: 42646 - DNA, 22 bp, Artificial Sequence
  chemically synthesized
agaaatagatattttaggccca

SEQ ID NO: 42647 - DNA, 22 bp, Artificial Sequence
  chemically synthesized
taggcccatatccatgtcttca

SEQ ID NO: 42648 - DNA, 22 bp, Artificial Sequence
  chemically synthesized
aggcccatatccatgtcttcac

SEQ ID NO: 42649 - DNA, 22 bp, Artificial Sequence
  chemically synthesized
ggcccatatccatgtcttcacc

SEQ ID NO: 42650 - DNA, 22 bp, Artificial Sequence
  chemically synthesized
caccccgcactgtttctcattt

SEQ ID NO: 42651 - DNA, 22 bp, Artificial Sequence
  chemically synthesized
accccgcactgtttctcatttg

SEQ ID NO: 42652 - DNA, 22 bp, Artificial Sequence
  chemically synthesized
tttctcatttgaactctctttt

SEQ ID NO: 42653 - DNA, 22 bp, Artificial Sequence
  chemically synthesized
ctcatttgaactctcttttcca

SEQ ID NO: 42654 - DNA, 22 bp, Artificial Sequence
  chemically synthesized
tcatttgaactctcttttccag

SEQ ID NO: 42655 - DNA, 22 bp, Artificial Sequence
  chemically synthesized
atttgaactctcttttccagga

SEQ ID NO: 42656 - DNA, 22 bp, Artificial Sequence
  chemically synthesized
gaactctcttttccaggaagag

SEQ ID NO: 42657 - DNA, 22 bp, Artificial Sequence
  chemically synthesized
aactctcttttccaggaagagt

SEQ ID NO: 42658 - DNA, 22 bp, Artificial Sequence
  chemically synthesized
tcttttccaggaagagttgtgc

SEQ ID NO: 42659 - DNA, 22 bp, Artificial Sequence
  chemically synthesized
ttttccaggaagagttgtgctt

SEQ ID NO: 42660 - DNA, 22 bp, Artificial Sequence
  chemically synthesized
ttccaggaagagttgtgcttgg

SEQ ID NO: 42661 - DNA, 22 bp, Artificial Sequence
  chemically synthesized
tccaggaagagttgtgcttggg

SEQ ID NO: 42662 - DNA, 22 bp, Artificial Sequence
  chemically synthesized
ccaggaagagttgtgcttgggt

SEQ ID NO: 42663 - DNA, 22 bp, Artificial Sequence
  chemically synthesized
caggaagagttgtgcttgggta

SEQ ID NO: 42664 - DNA, 22 bp, Artificial Sequence
  chemically synthesized
tgcttgggtaaattctatagct

SEQ ID NO: 42665 - DNA, 22 bp, Artificial Sequence
  chemically synthesized
gggtaaattctatagctcacag

SEQ ID NO: 42666 - DNA, 22 bp, Artificial Sequence
  chemically synthesized
ggtaaattctatagctcacagt

SEQ ID NO: 42667 - DNA, 22 bp, Artificial Sequence
  chemically synthesized
tatagctcacagtgtgacttca

SEQ ID NO: 42668 - DNA, 22 bp, Artificial Sequence
  chemically synthesized
tagctcacagtgtgacttcaaa

SEQ ID NO: 42669 - DNA, 22 bp, Artificial Sequence
  chemically synthesized
acagtgtgacttcaaaacacac

SEQ ID NO: 42670 - DNA, 22 bp, Artificial Sequence
  chemically synthesized
caaaacacacaataaattaata

SEQ ID NO: 42671 - DNA, 22 bp, Artificial Sequence
  chemically synthesized
aaaacacacaataaattaataa

SEQ ID NO: 42672 - DNA, 22 bp, Artificial Sequence
  chemically synthesized
ataaggtgcttcctacagtgag

SEQ ID NO: 42673 - DNA, 22 bp, Artificial Sequence
  chemically synthesized
cctacagtgagttcagttaaac

SEQ ID NO: 42674 - DNA, 22 bp, Artificial Sequence
  chemically synthesized
ctacagtgagttcagttaaaca

SEQ ID NO: 42675 - DNA, 22 bp, Artificial Sequence
  chemically synthesized
cagtgagttcagttaaacattt

SEQ ID NO: 42676 - DNA, 22 bp, Artificial Sequence
  chemically synthesized
agttaaacattttgaagagtgt

SEQ ID NO: 42677 - DNA, 22 bp, Artificial Sequence
  chemically synthesized
aacattttgaagagtgtttttg

SEQ ID NO: 42678 - DNA, 22 bp, Artificial Sequence
  chemically synthesized
tgaagagtgtttttgaaatgta

SEQ ID NO: 42679 - DNA, 22 bp, Artificial Sequence
  chemically synthesized
gaagagtgtttttgaaatgtag

SEQ ID NO: 42680 - DNA, 22 bp, Artificial Sequence
  chemically synthesized
aagagtgtttttgaaatgtagc

SEQ ID NO: 42681 - DNA, 22 bp, Artificial Sequence
  chemically synthesized
ttgaaatgtagcagagcaggct

SEQ ID NO: 42682 - DNA, 22 bp, Artificial Sequence
  chemically synthesized
tgaaatgtagcagagcaggcta

SEQ ID NO: 42683 - DNA, 22 bp, Artificial Sequence
  chemically synthesized
gaaatgtagcagagcaggctac

SEQ ID NO: 42684 - DNA, 22 bp, Artificial Sequence
  chemically synthesized
aaatgtagcagagcaggctaca

SEQ ID NO: 42685 - DNA, 22 bp, Artificial Sequence
  chemically synthesized
caattgatattcaaaaagagga

SEQ ID NO: 42686 - DNA, 22 bp, Artificial Sequence
  chemically synthesized
atattcaaaaagaggaaacttc

SEQ ID NO: 42687 - DNA, 22 bp, Artificial Sequence
  chemically synthesized
aaaaagaggaaacttccattta

SEQ ID NO: 42688 - DNA, 22 bp, Artificial Sequence
  chemically synthesized
ccatttatttccccctttaact

SEQ ID NO: 42689 - DNA, 22 bp, Artificial Sequence
  chemically synthesized
catttatttccccctttaacta

SEQ ID NO: 42690 - DNA, 22 bp, Artificial Sequence
  chemically synthesized
atttccccctttaactaagtta

SEQ ID NO: 42691 - DNA, 22 bp, Artificial Sequence
  chemically synthesized
tttccccctttaactaagttac

SEQ ID NO: 42692 - DNA, 22 bp, Artificial Sequence
  chemically synthesized
ccccctttaactaagttacctg

SEQ ID NO: 42693 - DNA, 22 bp, Artificial Sequence
  chemically synthesized
cccctttaactaagttacctgt

SEQ ID NO: 42694 - DNA, 22 bp, Artificial Sequence
  chemically synthesized
taactaagttacctgtaactgt

SEQ ID NO: 42695 - DNA, 22 bp, Artificial Sequence
  chemically synthesized
aactaagttacctgtaactgtg

SEQ ID NO: 42696 - DNA, 22 bp, Artificial Sequence
  chemically synthesized
actaagttacctgtaactgtgt

SEQ ID NO: 42697 - DNA, 22 bp, Artificial Sequence
  chemically synthesized
agttacctgtaactgtgtcatt

SEQ ID NO: 42698 - DNA, 22 bp, Artificial Sequence
  chemically synthesized
cctgtaactgtgtcattttatt

SEQ ID NO: 42699 - DNA, 22 bp, Artificial Sequence
  chemically synthesized
taactgtgtcattttattatgc

SEQ ID NO: 42700 - DNA, 22 bp, Artificial Sequence
  chemically synthesized
tgtcattttattatgcttcata

SEQ ID NO: 42701 - DNA, 22 bp, Artificial Sequence
  chemically synthesized
tattatgcttcatagagcatca

SEQ ID NO: 42702 - DNA, 22 bp, Artificial Sequence
  chemically synthesized
attatgcttcatagagcatcac

SEQ ID NO: 42703 - DNA, 22 bp, Artificial Sequence
  chemically synthesized
ttatgcttcatagagcatcact

SEQ ID NO: 42704 - DNA, 22 bp, Artificial Sequence
  chemically synthesized
tgcttcatagagcatcactgct

SEQ ID NO: 42705 - DNA, 22 bp, Artificial Sequence
  chemically synthesized
catagagcatcactgctgagat

SEQ ID NO: 42706 - DNA, 22 bp, Artificial Sequence
  chemically synthesized
atagagcatcactgctgagatc

SEQ ID NO: 42707 - DNA, 22 bp, Artificial Sequence
  chemically synthesized
ctgagatcccctccccagctca

SEQ ID NO: 42708 - DNA, 22 bp, Artificial Sequence
  chemically synthesized
agatcccctccccagctcatgt

SEQ ID NO: 42709 - DNA, 22 bp, Artificial Sequence
  chemically synthesized
cccagctcatgttgctaggaaa

SEQ ID NO: 42710 - DNA, 22 bp, Artificial Sequence
  chemically synthesized
atgttgctaggaaatatcccaa

SEQ ID NO: 42711 - DNA, 22 bp, Artificial Sequence
  chemically synthesized
ctaggaaatatcccaaaacaga

SEQ ID NO: 42712 - DNA, 22 bp, Artificial Sequence
  chemically synthesized
ggaaatatcccaaaacagaatc

SEQ ID NO: 42713 - DNA, 22 bp, Artificial Sequence
  chemically synthesized
ttctttttttaacctgatgatt

SEQ ID NO: 42714 - DNA, 22 bp, Artificial Sequence
  chemically synthesized
tctttttttaacctgatgattt

SEQ ID NO: 42715 - DNA, 22 bp, Artificial Sequence
  chemically synthesized
ctttttttaacctgatgatttt

SEQ ID NO: 42716 - DNA, 22 bp, Artificial Sequence
  chemically synthesized
tttttttaacctgatgattttt

SEQ ID NO: 42717 - DNA, 22 bp, Artificial Sequence
  chemically synthesized
tttttaacctgatgatttttcc

SEQ ID NO: 42718 - DNA, 22 bp, Artificial Sequence
  chemically synthesized
ttttaacctgatgatttttcca

SEQ ID NO: 42719 - DNA, 22 bp, Artificial Sequence
  chemically synthesized
tttaacctgatgatttttccac

SEQ ID NO: 42720 - DNA, 22 bp, Artificial Sequence
  chemically synthesized
ttaacctgatgatttttccaca

SEQ ID NO: 42721 - DNA, 22 bp, Artificial Sequence
  chemically synthesized
taacctgatgatttttccacaa

SEQ ID NO: 42722 - DNA, 22 bp, Artificial Sequence
  chemically synthesized
aacctgatgatttttccacaat

SEQ ID NO: 42723 - DNA, 22 bp, Artificial Sequence
  chemically synthesized
acctgatgatttttccacaatc

SEQ ID NO: 42724 - DNA, 22 bp, Artificial Sequence
  chemically synthesized
atgatttttccacaatcctttt

SEQ ID NO: 42725 - DNA, 22 bp, Artificial Sequence
  chemically synthesized
ttccacaatccttttgtttctc

SEQ ID NO: 42726 - DNA, 22 bp, Artificial Sequence
  chemically synthesized
tccacaatccttttgtttctct

SEQ ID NO: 42727 - DNA, 22 bp, Artificial Sequence
  chemically synthesized
ccacaatccttttgtttctctg

SEQ ID NO: 42728 - DNA, 22 bp, Artificial Sequence
  chemically synthesized
cacaatccttttgtttctctga

SEQ ID NO: 42729 - DNA, 22 bp, Artificial Sequence
  chemically synthesized
ttgtttctctgattcacctcca

SEQ ID NO: 42730 - DNA, 22 bp, Artificial Sequence
  chemically synthesized
tgtttctctgattcacctccag

SEQ ID NO: 42731 - DNA, 22 bp, Artificial Sequence
  chemically synthesized
gtttctctgattcacctccagg

SEQ ID NO: 42732 - DNA, 22 bp, Artificial Sequence
  chemically synthesized
tttctctgattcacctccaggg

SEQ ID NO: 42733 - DNA, 22 bp, Artificial Sequence
  chemically synthesized
ctctgattcacctccagggctc

SEQ ID NO: 42734 - DNA, 22 bp, Artificial Sequence
  chemically synthesized
tctgattcacctccagggctca

SEQ ID NO: 42735 - DNA, 22 bp, Artificial Sequence
  chemically synthesized
tgattcacctccagggctcata

SEQ ID NO: 42736 - DNA, 22 bp, Artificial Sequence
  chemically synthesized
attcacctccagggctcatatg

SEQ ID NO: 42737 - DNA, 22 bp, Artificial Sequence
  chemically synthesized
acctccagggctcatatggcaa

SEQ ID NO: 42738 - DNA, 22 bp, Artificial Sequence
  chemically synthesized
cagggctcatatggcaatgggg

SEQ ID NO: 42739 - DNA, 22 bp, Artificial Sequence
  chemically synthesized
atatggcaatggggatttaata

SEQ ID NO: 42740 - DNA, 22 bp, Artificial Sequence
  chemically synthesized
aatagggtttatttgttggtga

SEQ ID NO: 42741 - DNA, 22 bp, Artificial Sequence
  chemically synthesized
atagggtttatttgttggtgaa

SEQ ID NO: 42742 - DNA, 22 bp, Artificial Sequence
  chemically synthesized
atttgttggtgaagaaacatta

SEQ ID NO: 42743 - DNA, 22 bp, Artificial Sequence
  chemically synthesized
tttgttggtgaagaaacattaa

SEQ ID NO: 42744 - DNA, 22 bp, Artificial Sequence
  chemically synthesized
gttggtgaagaaacattaaaca

SEQ ID NO: 42745 - DNA, 22 bp, Artificial Sequence
  chemically synthesized
ttggtgaagaaacattaaacaa

SEQ ID NO: 42746 - DNA, 22 bp, Artificial Sequence
  chemically synthesized
gtgaagaaacattaaacaaatc

SEQ ID NO: 42747 - DNA, 22 bp, Artificial Sequence
  chemically synthesized
aacaaatcttttaataggaaaa

SEQ ID NO: 42748 - DNA, 22 bp, Artificial Sequence
  chemically synthesized
ttaataggaaaaatacttttat

SEQ ID NO: 42749 - DNA, 22 bp, Artificial Sequence
  chemically synthesized
taataggaaaaatacttttata

SEQ ID NO: 42750 - DNA, 22 bp, Artificial Sequence
  chemically synthesized
aataggaaaaatacttttatat

SEQ ID NO: 42751 - DNA, 22 bp, Artificial Sequence
  chemically synthesized
ataggaaaaatacttttatatt

SEQ ID NO: 42752 - DNA, 22 bp, Artificial Sequence
  chemically synthesized
ttatattataggcaaaatgtag

SEQ ID NO: 42753 - DNA, 22 bp, Artificial Sequence
  chemically synthesized
tatattataggcaaaatgtaga

SEQ ID NO: 42754 - DNA, 22 bp, Artificial Sequence
  chemically synthesized
atattataggcaaaatgtagat

SEQ ID NO: 42755 - DNA, 22 bp, Artificial Sequence
  chemically synthesized
tattataggcaaaatgtagatg

SEQ ID NO: 42756 - DNA, 22 bp, Artificial Sequence
  chemically synthesized
taggcaaaatgtagatgtatat

SEQ ID NO: 42757 - DNA, 22 bp, Artificial Sequence
  chemically synthesized
ctactgaagtaaatgtatttta

SEQ ID NO: 42758 - DNA, 22 bp, Artificial Sequence
  chemically synthesized
ctgaagtaaatgtattttatta

SEQ ID NO: 42759 - DNA, 22 bp, Artificial Sequence
  chemically synthesized
aagtaaatgtattttattaatg

SEQ ID NO: 42760 - DNA, 22 bp, Artificial Sequence
  chemically synthesized
tattaatggtgtgagaatttct

SEQ ID NO: 42761 - DNA, 22 bp, Artificial Sequence
  chemically synthesized
attaatggtgtgagaatttctt

SEQ ID NO: 42762 - DNA, 22 bp, Artificial Sequence
  chemically synthesized
ttaatggtgtgagaatttcttc

SEQ ID NO: 42763 - DNA, 22 bp, Artificial Sequence
  chemically synthesized
atggtgtgagaatttcttcctc

SEQ ID NO: 42764 - DNA, 22 bp, Artificial Sequence
  chemically synthesized
cttcctcactgtggtgtgtgaa

SEQ ID NO: 42765 - DNA, 22 bp, Artificial Sequence
  chemically synthesized
ttcctcactgtggtgtgtgaat

SEQ ID NO: 42766 - DNA, 22 bp, Artificial Sequence
  chemically synthesized
cctcactgtggtgtgtgaatgt

SEQ ID NO: 42767 - DNA, 22 bp, Artificial Sequence
  chemically synthesized
ctcactgtggtgtgtgaatgtg

SEQ ID NO: 42768 - DNA, 22 bp, Artificial Sequence
  chemically synthesized
actgtggtgtgtgaatgtgtat

SEQ ID NO: 42769 - DNA, 22 bp, Artificial Sequence
  chemically synthesized
tggtgtgtgaatgtgtatgcat

SEQ ID NO: 42770 - DNA, 22 bp, Artificial Sequence
  chemically synthesized
gcatgtgtaaaagacttagcaa

SEQ ID NO: 42771 - DNA, 22 bp, Artificial Sequence
  chemically synthesized
catgtgtaaaagacttagcaat

SEQ ID NO: 42772 - DNA, 22 bp, Artificial Sequence
  chemically synthesized
agcaatttgtgaatagaagatg

SEQ ID NO: 42773 - DNA, 22 bp, Artificial Sequence
  chemically synthesized
gcaatttgtgaatagaagatgt

SEQ ID NO: 42774 - DNA, 22 bp, Artificial Sequence
  chemically synthesized
gtgaatagaagatgtttctccg

SEQ ID NO: 42775 - DNA, 22 bp, Artificial Sequence
  chemically synthesized
tgaatagaagatgtttctccgc

SEQ ID NO: 42776 - DNA, 22 bp, Artificial Sequence
  chemically synthesized
ctccgcttctcactgagcatgg

SEQ ID NO: 42777 - DNA, 22 bp, Artificial Sequence
  chemically synthesized
tccgcttctcactgagcatggc

SEQ ID NO: 42778 - DNA, 22 bp, Artificial Sequence
  chemically synthesized
cgcttctcactgagcatggctg

SEQ ID NO: 42779 - DNA, 22 bp, Artificial Sequence
  chemically synthesized
ctcactgagcatggctgtaaaa

SEQ ID NO: 42780 - DNA, 22 bp, Artificial Sequence
  chemically synthesized
tcactgagcatggctgtaaaag

SEQ ID NO: 42781 - DNA, 22 bp, Artificial Sequence
  chemically synthesized
actgagcatggctgtaaaagaa

SEQ ID NO: 42782 - DNA, 22 bp, Artificial Sequence
  chemically synthesized
agcatggctgtaaaagaaactt

SEQ ID NO: 42783 - DNA, 22 bp, Artificial Sequence
  chemically synthesized
taaaagaaactttttcctctcc

SEQ ID NO: 42784 - DNA, 22 bp, Artificial Sequence
  chemically synthesized
tttcctctccccgggcattcca

SEQ ID NO: 42785 - DNA, 22 bp, Artificial Sequence
  chemically synthesized
ttcctctccccgggcattccag

SEQ ID NO: 42786 - DNA, 22 bp, Artificial Sequence
  chemically synthesized
tcctctccccgggcattccagc

SEQ ID NO: 42787 - DNA, 22 bp, Artificial Sequence
  chemically synthesized
cctctccccgggcattccagca

SEQ ID NO: 42788 - DNA, 22 bp, Artificial Sequence
  chemically synthesized
ctctccccgggcattccagcac

SEQ ID NO: 42789 - DNA, 22 bp, Artificial Sequence
  chemically synthesized
tccccgggcattccagcacaca

SEQ ID NO: 42790 - DNA, 22 bp, Artificial Sequence
  chemically synthesized
cccgggcattccagcacacatt

SEQ ID NO: 42791 - DNA, 22 bp, Artificial Sequence
  chemically synthesized
cagcacacattggaaagataac

SEQ ID NO: 42792 - DNA, 22 bp, Artificial Sequence
  chemically synthesized
gaaagataacacgtccacagaa

SEQ ID NO: 42793 - DNA, 22 bp, Artificial Sequence
  chemically synthesized
gctttccaaaagagcttatcag

SEQ ID NO: 42794 - DNA, 22 bp, Artificial Sequence
  chemically synthesized
tccaaaagagcttatcagagaa

SEQ ID NO: 42795 - DNA, 22 bp, Artificial Sequence
  chemically synthesized
ccaaaagagcttatcagagaat

SEQ ID NO: 42796 - DNA, 22 bp, Artificial Sequence
  chemically synthesized
caaaagagcttatcagagaatg

SEQ ID NO: 42797 - DNA, 22 bp, Artificial Sequence
  chemically synthesized
atcagagaatgtgccccccagg

SEQ ID NO: 42798 - DNA, 22 bp, Artificial Sequence
  chemically synthesized
tcagagaatgtgccccccaggt

SEQ ID NO: 42799 - DNA, 22 bp, Artificial Sequence
  chemically synthesized
aaacatatgttaatcctgtggc

SEQ ID NO: 42800 - DNA, 22 bp, Artificial Sequence
  chemically synthesized
atcctgtggcagagaagtttgt

SEQ ID NO: 42801 - DNA, 22 bp, Artificial Sequence
  chemically synthesized
tggcagagaagtttgttctagc

SEQ ID NO: 42802 - DNA, 22 bp, Artificial Sequence
  chemically synthesized
gttctagcctttgggtgtagcc

SEQ ID NO: 42803 - DNA, 22 bp, Artificial Sequence
  chemically synthesized
ttctagcctttgggtgtagcct

SEQ ID NO: 42804 - DNA, 22 bp, Artificial Sequence
  chemically synthesized
tagcctttgggtgtagcctgct

SEQ ID NO: 42805 - DNA, 22 bp, Artificial Sequence
  chemically synthesized
gcctttgggtgtagcctgctga

SEQ ID NO: 42806 - DNA, 22 bp, Artificial Sequence
  chemically synthesized
tgggtgtagcctgctgaataag

SEQ ID NO: 42807 - DNA, 22 bp, Artificial Sequence
  chemically synthesized
gggtgtagcctgctgaataagt

SEQ ID NO: 42808 - DNA, 22 bp, Artificial Sequence
  chemically synthesized
ggtgtagcctgctgaataagtt

SEQ ID NO: 42809 - DNA, 22 bp, Artificial Sequence
  chemically synthesized
ctgaataagttcacagtgatct

SEQ ID NO: 42810 - DNA, 22 bp, Artificial Sequence
  chemically synthesized
aataagttcacagtgatctaca

SEQ ID NO: 42811 - DNA, 22 bp, Artificial Sequence
  chemically synthesized
acagtgatctacatcctagttt

SEQ ID NO: 42812 - DNA, 22 bp, Artificial Sequence
  chemically synthesized
catcctagtttccatgggctga

SEQ ID NO: 42813 - DNA, 22 bp, Artificial Sequence
  chemically synthesized
gtttccatgggctgaaatagaa

SEQ ID NO: 42814 - DNA, 22 bp, Artificial Sequence
  chemically synthesized
ccatgggctgaaatagaatatt

SEQ ID NO: 42815 - DNA, 22 bp, Artificial Sequence
  chemically synthesized
catgggctgaaatagaatattc

SEQ ID NO: 42816 - DNA, 22 bp, Artificial Sequence
  chemically synthesized
aaatagaatattcatatcccct

SEQ ID NO: 42817 - DNA, 22 bp, Artificial Sequence
  chemically synthesized
atatcccctgcactccctacac

SEQ ID NO: 42818 - DNA, 22 bp, Artificial Sequence
  chemically synthesized
cactccctacacacacagacat

SEQ ID NO: 42819 - DNA, 22 bp, Artificial Sequence
  chemically synthesized
cctacacacacagacatagaca

SEQ ID NO: 42820 - DNA, 22 bp, Artificial Sequence
  chemically synthesized
cacacacagacatagacaccaa

SEQ ID NO: 42821 - DNA, 22 bp, Artificial Sequence
  chemically synthesized
ccccaaaaaactctttgcttaa

SEQ ID NO: 42822 - DNA, 22 bp, Artificial Sequence
  chemically synthesized
cccaaaaaactctttgcttaat

SEQ ID NO: 42823 - DNA, 22 bp, Artificial Sequence
  chemically synthesized
tttgcttaatcttctcctgctc

SEQ ID NO: 42824 - DNA, 22 bp, Artificial Sequence
  chemically synthesized
tgcttaatcttctcctgctctg

SEQ ID NO: 42825 - DNA, 22 bp, Artificial Sequence
  chemically synthesized
gcttaatcttctcctgctctgt

SEQ ID NO: 42826 - DNA, 22 bp, Artificial Sequence
  chemically synthesized
cttaatcttctcctgctctgta

SEQ ID NO: 42827 - DNA, 22 bp, Artificial Sequence
  chemically synthesized
aatcttctcctgctctgtattt

SEQ ID NO: 42828 - DNA, 22 bp, Artificial Sequence
  chemically synthesized
atcttctcctgctctgtatttt

SEQ ID NO: 42829 - DNA, 22 bp, Artificial Sequence
  chemically synthesized
ctcctgctctgtattttctttg

SEQ ID NO: 42830 - DNA, 22 bp, Artificial Sequence
  chemically synthesized
tcctgctctgtattttctttga

SEQ ID NO: 42831 - DNA, 22 bp, Artificial Sequence
  chemically synthesized
ctgctctgtattttctttgata

SEQ ID NO: 42832 - DNA, 22 bp, Artificial Sequence
  chemically synthesized
ctctgtattttctttgatattt

SEQ ID NO: 42833 - DNA, 22 bp, Artificial Sequence
  chemically synthesized
tgtattttctttgatattttct

SEQ ID NO: 42834 - DNA, 22 bp, Artificial Sequence
  chemically synthesized
tattttctttgatattttcttg

SEQ ID NO: 42835 - DNA, 22 bp, Artificial Sequence
  chemically synthesized
tctttgatattttcttgaatgg

SEQ ID NO: 42836 - DNA, 22 bp, Artificial Sequence
  chemically synthesized
ctttgatattttcttgaatggc

SEQ ID NO: 42837 - DNA, 22 bp, Artificial Sequence
  chemically synthesized
tttgatattttcttgaatggct

SEQ ID NO: 42838 - DNA, 22 bp, Artificial Sequence
  chemically synthesized
tgatattttcttgaatggcttc

SEQ ID NO: 42839 - DNA, 22 bp, Artificial Sequence
  chemically synthesized
gatattttcttgaatggcttcc

SEQ ID NO: 42840 - DNA, 22 bp, Artificial Sequence
  chemically synthesized
atattttcttgaatggcttcca

SEQ ID NO: 42841 - DNA, 22 bp, Artificial Sequence
  chemically synthesized
tcttgaatggcttccactaaat

SEQ ID NO: 42842 - DNA, 22 bp, Artificial Sequence
  chemically synthesized
cttgaatggcttccactaaatt

SEQ ID NO: 42843 - DNA, 22 bp, Artificial Sequence
  chemically synthesized
ttgaatggcttccactaaattc

SEQ ID NO: 42844 - DNA, 22 bp, Artificial Sequence
  chemically synthesized
gaatggcttccactaaattcaa

SEQ ID NO: 42845 - DNA, 22 bp, Artificial Sequence
  chemically synthesized
aatggcttccactaaattcaaa

SEQ ID NO: 42846 - DNA, 22 bp, Artificial Sequence
  chemically synthesized
ccactaaattcaaatgtgtttg

SEQ ID NO: 42847 - DNA, 22 bp, Artificial Sequence
  chemically synthesized
cactaaattcaaatgtgtttga

SEQ ID NO: 42848 - DNA, 22 bp, Artificial Sequence
  chemically synthesized
aattcaaatgtgtttgacttta

SEQ ID NO: 42849 - DNA, 22 bp, Artificial Sequence
  chemically synthesized
aaatgtgtttgactttaaagtc

SEQ ID NO: 42850 - DNA, 22 bp, Artificial Sequence
  chemically synthesized
gactttaaagtcaacttgtaaa

SEQ ID NO: 42851 - DNA, 22 bp, Artificial Sequence
  chemically synthesized
actttaaagtcaacttgtaaaa

SEQ ID NO: 42852 - DNA, 22 bp, Artificial Sequence
  chemically synthesized
taaagtcaacttgtaaaatttt

SEQ ID NO: 42853 - DNA, 22 bp, Artificial Sequence
  chemically synthesized
aaagtcaacttgtaaaatttta

SEQ ID NO: 42854 - DNA, 22 bp, Artificial Sequence
  chemically synthesized
aagtcaacttgtaaaattttat

SEQ ID NO: 42855 - DNA, 22 bp, Artificial Sequence
  chemically synthesized
gtaaaattttatctggtaattt

SEQ ID NO: 42856 - DNA, 22 bp, Artificial Sequence
  chemically synthesized
taaaattttatctggtaattta

SEQ ID NO: 42857 - DNA, 22 bp, Artificial Sequence
  chemically synthesized
tatctggtaatttatagattaa

SEQ ID NO: 42858 - DNA, 22 bp, Artificial Sequence
  chemically synthesized
atctggtaatttatagattaaa

SEQ ID NO: 42859 - DNA, 22 bp, Artificial Sequence
  chemically synthesized
tctggtaatttatagattaaat

SEQ ID NO: 42860 - DNA, 22 bp, Artificial Sequence
  chemically synthesized
gtaatttatagattaaattgca

SEQ ID NO: 42861 - DNA, 22 bp, Artificial Sequence
  chemically synthesized
atagattaaattgcaagcatct

SEQ ID NO: 42862 - DNA, 22 bp, Artificial Sequence
  chemically synthesized
tagattaaattgcaagcatcta

SEQ ID NO: 42863 - DNA, 22 bp, Artificial Sequence
  chemically synthesized
aattgcaagcatctacctccct

SEQ ID NO: 42864 - DNA, 22 bp, Artificial Sequence
  chemically synthesized
caagcatctacctccctttcat

SEQ ID NO: 42865 - DNA, 22 bp, Artificial Sequence
  chemically synthesized
cctccctttcatcagactctcc

SEQ ID NO: 42866 - DNA, 22 bp, Artificial Sequence
  chemically synthesized
cctttcatcagactctccctgc

SEQ ID NO: 42867 - DNA, 22 bp, Artificial Sequence
  chemically synthesized
tcatcagactctccctgcaggg

SEQ ID NO: 42868 - DNA, 22 bp, Artificial Sequence
  chemically synthesized
catcagactctccctgcagggc

SEQ ID NO: 42869 - DNA, 22 bp, Artificial Sequence
  chemically synthesized
atcagactctccctgcagggca

SEQ ID NO: 42870 - DNA, 22 bp, Artificial Sequence
  chemically synthesized
tccctgcagggcaagttcatct

SEQ ID NO: 42871 - DNA, 22 bp, Artificial Sequence
  chemically synthesized
cctgcagggcaagttcatctaa

SEQ ID NO: 42872 - DNA, 22 bp, Artificial Sequence
  chemically synthesized
cagggcaagttcatctaactat

SEQ ID NO: 42873 - DNA, 22 bp, Artificial Sequence
  chemically synthesized
atctaactatgtatgtgcttca

SEQ ID NO: 42874 - DNA, 22 bp, Artificial Sequence
  chemically synthesized
actatgtatgtgcttcaagatg

SEQ ID NO: 42875 - DNA, 22 bp, Artificial Sequence
  chemically synthesized
tgtatgtgcttcaagatggaac

SEQ ID NO: 42876 - DNA, 22 bp, Artificial Sequence
  chemically synthesized
caagatggaactcctgagttca

SEQ ID NO: 42877 - DNA, 22 bp, Artificial Sequence
  chemically synthesized
aagatggaactcctgagttcac

SEQ ID NO: 42878 - DNA, 22 bp, Artificial Sequence
  chemically synthesized
ctgagttcacaggtgatttata

SEQ ID NO: 42879 - DNA, 22 bp, Artificial Sequence
  chemically synthesized
agttcacaggtgatttataaac

SEQ ID NO: 42880 - DNA, 22 bp, Artificial Sequence
  chemically synthesized
acaggtgatttataaaccaaag

SEQ ID NO: 42881 - DNA, 22 bp, Artificial Sequence
  chemically synthesized
ataaaccaaagcatgcccacta

SEQ ID NO: 42882 - DNA, 22 bp, Artificial Sequence
  chemically synthesized
taaaccaaagcatgcccactac

SEQ ID NO: 42883 - DNA, 22 bp, Artificial Sequence
  chemically synthesized
caaaactctcaccctccagaga

SEQ ID NO: 42884 - DNA, 22 bp, Artificial Sequence
  chemically synthesized
tcaccctccagagatttgcctc

SEQ ID NO: 42885 - DNA, 22 bp, Artificial Sequence
  chemically synthesized
accctccagagatttgcctcaa

SEQ ID NO: 42886 - DNA, 22 bp, Artificial Sequence
  chemically synthesized
cagagatttgcctcaagggaca

SEQ ID NO: 42887 - DNA, 22 bp, Artificial Sequence
  chemically synthesized
gcctcaagggacaacaccctgc

SEQ ID NO: 42888 - DNA, 22 bp, Artificial Sequence
  chemically synthesized
cctcaagggacaacaccctgct

SEQ ID NO: 42889 - DNA, 22 bp, Artificial Sequence
  chemically synthesized
aagggacaacaccctgctcaca

SEQ ID NO: 42890 - DNA, 22 bp, Artificial Sequence
  chemically synthesized
ctcacaaaggcaccagcaggca

SEQ ID NO: 42891 - DNA, 22 bp, Artificial Sequence
  chemically synthesized
acaaaggcaccagcaggcaact

SEQ ID NO: 42892 - DNA, 22 bp, Artificial Sequence
  chemically synthesized
ctcaactacctggtggataagg

SEQ ID NO: 42893 - DNA, 22 bp, Artificial Sequence
  chemically synthesized
aactacctggtggataaggtgc

SEQ ID NO: 42894 - DNA, 22 bp, Artificial Sequence
  chemically synthesized
cctggtggataaggtgcccaag

SEQ ID NO: 42895 - DNA, 22 bp, Artificial Sequence
  chemically synthesized
gtggataaggtgcccaagctag

SEQ ID NO: 42896 - DNA, 22 bp, Artificial Sequence
  chemically synthesized
gcatggacccctgaatccttgc

SEQ ID NO: 42897 - DNA, 22 bp, Artificial Sequence
  chemically synthesized
aatccttgctcgcctcctctgt

SEQ ID NO: 42898 - DNA, 22 bp, Artificial Sequence
  chemically synthesized
gctcgcctcctctgttgccttt

SEQ ID NO: 42899 - DNA, 22 bp, Artificial Sequence
  chemically synthesized
ctcgcctcctctgttgcctttt

SEQ ID NO: 42900 - DNA, 22 bp, Artificial Sequence
  chemically synthesized
gcctcctctgttgccttttaaa

SEQ ID NO: 42901 - DNA, 22 bp, Artificial Sequence
  chemically synthesized
ctctgttgccttttaaaagtgc

SEQ ID NO: 42902 - DNA, 22 bp, Artificial Sequence
  chemically synthesized
tgttgccttttaaaagtgccac

SEQ ID NO: 42903 - DNA, 22 bp, Artificial Sequence
  chemically synthesized
ttgccttttaaaagtgccactt

SEQ ID NO: 42904 - DNA, 22 bp, Artificial Sequence
  chemically synthesized
ccttttaaaagtgccactttct

SEQ ID NO: 42905 - DNA, 22 bp, Artificial Sequence
  chemically synthesized
ttaaaagtgccactttctgctc

SEQ ID NO: 42906 - DNA, 22 bp, Artificial Sequence
  chemically synthesized
taaaagtgccactttctgctcc

SEQ ID NO: 42907 - DNA, 22 bp, Artificial Sequence
  chemically synthesized
aaaagtgccactttctgctcct

SEQ ID NO: 42908 - DNA, 22 bp, Artificial Sequence
  chemically synthesized
aaagtgccactttctgctccta

SEQ ID NO: 42909 - DNA, 22 bp, Artificial Sequence
  chemically synthesized
tctgctcctaaagtgaagtagt

SEQ ID NO: 42910 - DNA, 22 bp, Artificial Sequence
  chemically synthesized
ctgctcctaaagtgaagtagta

SEQ ID NO: 42911 - DNA, 22 bp, Artificial Sequence
  chemically synthesized
tgctcctaaagtgaagtagtac

SEQ ID NO: 42912 - DNA, 22 bp, Artificial Sequence
  chemically synthesized
ctcctaaagtgaagtagtacgg

SEQ ID NO: 42913 - DNA, 22 bp, Artificial Sequence
  chemically synthesized
ctaaagtgaagtagtacggcag

SEQ ID NO: 42914 - DNA, 22 bp, Artificial Sequence
  chemically synthesized
aagtgaagtagtacggcaggac

SEQ ID NO: 42915 - DNA, 22 bp, Artificial Sequence
  chemically synthesized
ctgcatttcttcccctaagcta

SEQ ID NO: 42916 - DNA, 22 bp, Artificial Sequence
  chemically synthesized
catttcttcccctaagctagct

SEQ ID NO: 42917 - DNA, 22 bp, Artificial Sequence
  chemically synthesized
cttcccctaagctagctttgga

SEQ ID NO: 42918 - DNA, 22 bp, Artificial Sequence
  chemically synthesized
ttcccctaagctagctttggaa

SEQ ID NO: 42919 - DNA, 22 bp, Artificial Sequence
  chemically synthesized
cccctaagctagctttggaagc

SEQ ID NO: 42920 - DNA, 22 bp, Artificial Sequence
  chemically synthesized
ccctaagctagctttggaagca

SEQ ID NO: 42921 - DNA, 22 bp, Artificial Sequence
  chemically synthesized
agctagctttggaagcaaatca

SEQ ID NO: 42922 - DNA, 22 bp, Artificial Sequence
  chemically synthesized
gctttggaagcaaatcactttc

SEQ ID NO: 42923 - DNA, 22 bp, Artificial Sequence
  chemically synthesized
tggaagcaaatcactttcttta

SEQ ID NO: 42924 - DNA, 22 bp, Artificial Sequence
  chemically synthesized
ggaagcaaatcactttctttat

SEQ ID NO: 42925 - DNA, 22 bp, Artificial Sequence
  chemically synthesized
gaagcaaatcactttctttata

SEQ ID NO: 42926 - DNA, 22 bp, Artificial Sequence
  chemically synthesized
tctttataccagacttctctct

SEQ ID NO: 42927 - DNA, 22 bp, Artificial Sequence
  chemically synthesized
ctttataccagacttctctctt

SEQ ID NO: 42928 - DNA, 22 bp, Artificial Sequence
  chemically synthesized
tttataccagacttctctcttc

SEQ ID NO: 42929 - DNA, 22 bp, Artificial Sequence
  chemically synthesized
tataccagacttctctcttctt

SEQ ID NO: 42930 - DNA, 22 bp, Artificial Sequence
  chemically synthesized
ataccagacttctctcttctta

SEQ ID NO: 42931 - DNA, 22 bp, Artificial Sequence
  chemically synthesized
taccagacttctctcttcttaa

SEQ ID NO: 42932 - DNA, 22 bp, Artificial Sequence
  chemically synthesized
ctctcttcttaattggattctg

SEQ ID NO: 42933 - DNA, 22 bp, Artificial Sequence
  chemically synthesized
tctcttcttaattggattctgc

SEQ ID NO: 42934 - DNA, 22 bp, Artificial Sequence
  chemically synthesized
tcttcttaattggattctgcaa

SEQ ID NO: 42935 - DNA, 22 bp, Artificial Sequence
  chemically synthesized
ttcttaattggattctgcaagt

SEQ ID NO: 42936 - DNA, 22 bp, Artificial Sequence
  chemically synthesized
cttaattggattctgcaagtgg

SEQ ID NO: 42937 - DNA, 22 bp, Artificial Sequence
  chemically synthesized
ttaattggattctgcaagtggc

SEQ ID NO: 42938 - DNA, 22 bp, Artificial Sequence
  chemically synthesized
aattggattctgcaagtggcaa

SEQ ID NO: 42939 - DNA, 22 bp, Artificial Sequence
  chemically synthesized
attggattctgcaagtggcaaa

SEQ ID NO: 42940 - DNA, 22 bp, Artificial Sequence
  chemically synthesized
gattctgcaagtggcaaacaat

SEQ ID NO: 42941 - DNA, 22 bp, Artificial Sequence
  chemically synthesized
tgcaagtggcaaacaattaacc

SEQ ID NO: 42942 - DNA, 22 bp, Artificial Sequence
  chemically synthesized
caagtggcaaacaattaacctg

SEQ ID NO: 42943 - DNA, 22 bp, Artificial Sequence
  chemically synthesized
acctgctcttcagttacattgg

SEQ ID NO: 42944 - DNA, 22 bp, Artificial Sequence
  chemically synthesized
ctcttcagttacattggaatgt

SEQ ID NO: 42945 - DNA, 22 bp, Artificial Sequence
  chemically synthesized
ttcagttacattggaatgtgtt

SEQ ID NO: 42946 - DNA, 22 bp, Artificial Sequence
  chemically synthesized
cagttacattggaatgtgttta

SEQ ID NO: 42947 - DNA, 22 bp, Artificial Sequence
  chemically synthesized
agttacattggaatgtgtttag

SEQ ID NO: 42948 - DNA, 22 bp, Artificial Sequence
  chemically synthesized
cattggaatgtgtttagattta

SEQ ID NO: 42949 - DNA, 22 bp, Artificial Sequence
  chemically synthesized
gaatgtgtttagatttattttt

SEQ ID NO: 42950 - DNA, 22 bp, Artificial Sequence
  chemically synthesized
agatttattttttcaaatgttg

SEQ ID NO: 42951 - DNA, 22 bp, Artificial Sequence
  chemically synthesized
gatttattttttcaaatgttgg

SEQ ID NO: 42952 - DNA, 22 bp, Artificial Sequence
  chemically synthesized
attttttcaaatgttggaacaa

SEQ ID NO: 42953 - DNA, 22 bp, Artificial Sequence
  chemically synthesized
ttttttcaaatgttggaacaaa

SEQ ID NO: 42954 - DNA, 22 bp, Artificial Sequence
  chemically synthesized
tttcaaatgttggaacaaagat

SEQ ID NO: 42955 - DNA, 22 bp, Artificial Sequence
  chemically synthesized
ttcaaatgttggaacaaagatg

SEQ ID NO: 42956 - DNA, 22 bp, Artificial Sequence
  chemically synthesized
tcaaatgttggaacaaagatga

SEQ ID NO: 42957 - DNA, 22 bp, Artificial Sequence
  chemically synthesized
caaatgttggaacaaagatgaa

SEQ ID NO: 42958 - DNA, 22 bp, Artificial Sequence
  chemically synthesized
aaatgttggaacaaagatgaaa

SEQ ID NO: 42959 - DNA, 22 bp, Artificial Sequence
  chemically synthesized
gaacaaagatgaaaaagtgaga

SEQ ID NO: 42960 - DNA, 22 bp, Artificial Sequence
  chemically synthesized
gattttttcttggaaatctggc

SEQ ID NO: 42961 - DNA, 22 bp, Artificial Sequence
  chemically synthesized
tttcttggaaatctggcttaaa

SEQ ID NO: 42962 - DNA, 22 bp, Artificial Sequence
  chemically synthesized
ttcttggaaatctggcttaaat

SEQ ID NO: 42963 - DNA, 22 bp, Artificial Sequence
  chemically synthesized
tcttggaaatctggcttaaatc

SEQ ID NO: 42964 - DNA, 22 bp, Artificial Sequence
  chemically synthesized
cttggaaatctggcttaaatcc

SEQ ID NO: 42965 - DNA, 22 bp, Artificial Sequence
  chemically synthesized
ttggaaatctggcttaaatcca

SEQ ID NO: 42966 - DNA, 22 bp, Artificial Sequence
  chemically synthesized
ggaaatctggcttaaatccagg

SEQ ID NO: 42967 - DNA, 22 bp, Artificial Sequence
  chemically synthesized
gaaatctggcttaaatccaggt

SEQ ID NO: 42968 - DNA, 22 bp, Artificial Sequence
  chemically synthesized
gcttaaatccaggtttctttat

SEQ ID NO: 42969 - DNA, 22 bp, Artificial Sequence
  chemically synthesized
aaatccaggtttctttatttcc

SEQ ID NO: 42970 - DNA, 22 bp, Artificial Sequence
  chemically synthesized
aatccaggtttctttatttcct

SEQ ID NO: 42971 - DNA, 22 bp, Artificial Sequence
  chemically synthesized
ctttatttccttgatttgggaa

SEQ ID NO: 42972 - DNA, 22 bp, Artificial Sequence
  chemically synthesized
tttatttccttgatttgggaat

SEQ ID NO: 42973 - DNA, 22 bp, Artificial Sequence
  chemically synthesized
tatttccttgatttgggaattt

SEQ ID NO: 42974 - DNA, 22 bp, Artificial Sequence
  chemically synthesized
atttccttgatttgggaatttg

SEQ ID NO: 42975 - DNA, 22 bp, Artificial Sequence
  chemically synthesized
tttccttgatttgggaatttgg

SEQ ID NO: 42976 - DNA, 22 bp, Artificial Sequence
  chemically synthesized
ccttgatttgggaatttggtca

SEQ ID NO: 42977 - DNA, 22 bp, Artificial Sequence
  chemically synthesized
cttgatttgggaatttggtcac

SEQ ID NO: 42978 - DNA, 22 bp, Artificial Sequence
  chemically synthesized
gatttgggaatttggtcacgag

SEQ ID NO: 42979 - DNA, 22 bp, Artificial Sequence
  chemically synthesized
atttgggaatttggtcacgaga

SEQ ID NO: 42980 - DNA, 22 bp, Artificial Sequence
  chemically synthesized
gggaatttggtcacgagacaaa

SEQ ID NO: 42981 - DNA, 22 bp, Artificial Sequence
  chemically synthesized
ggaatttggtcacgagacaaat

SEQ ID NO: 42982 - DNA, 22 bp, Artificial Sequence
  chemically synthesized
ggtcacgagacaaataacatga

SEQ ID NO: 42983 - DNA, 22 bp, Artificial Sequence
  chemically synthesized
gtcacgagacaaataacatgat

SEQ ID NO: 42984 - DNA, 22 bp, Artificial Sequence
  chemically synthesized
tcctaagtctagatttctttgt

SEQ ID NO: 42985 - DNA, 22 bp, Artificial Sequence
  chemically synthesized
cctaagtctagatttctttgtt

SEQ ID NO: 42986 - DNA, 22 bp, Artificial Sequence
  chemically synthesized
ctaagtctagatttctttgttt

SEQ ID NO: 42987 - DNA, 22 bp, Artificial Sequence
  chemically synthesized
agtctagatttctttgtttata

SEQ ID NO: 42988 - DNA, 22 bp, Artificial Sequence
  chemically synthesized
gatttctttgtttataaaatgg

SEQ ID NO: 42989 - DNA, 22 bp, Artificial Sequence
  chemically synthesized
ctttgtttataaaatggggatg

SEQ ID NO: 42990 - DNA, 22 bp, Artificial Sequence
  chemically synthesized
tttgtttataaaatggggatga

SEQ ID NO: 42991 - DNA, 22 bp, Artificial Sequence
  chemically synthesized
tgtttataaaatggggatgact

SEQ ID NO: 42992 - DNA, 22 bp, Artificial Sequence
  chemically synthesized
gtttataaaatggggatgacta

SEQ ID NO: 42993 - DNA, 22 bp, Artificial Sequence
  chemically synthesized
tttataaaatggggatgactat

SEQ ID NO: 42994 - DNA, 22 bp, Artificial Sequence
  chemically synthesized
ataaaatggggatgactatgct

SEQ ID NO: 42995 - DNA, 22 bp, Artificial Sequence
  chemically synthesized
taaaatggggatgactatgcta

SEQ ID NO: 42996 - DNA, 22 bp, Artificial Sequence
  chemically synthesized
tgctaccctacctataccatga

SEQ ID NO: 42997 - DNA, 22 bp, Artificial Sequence
  chemically synthesized
ccctacctataccatgagctaa

SEQ ID NO: 42998 - DNA, 22 bp, Artificial Sequence
  chemically synthesized
cctataccatgagctaaataag

SEQ ID NO: 42999 - DNA, 22 bp, Artificial Sequence
  chemically synthesized
taccatgagctaaataagctag

SEQ ID NO: 43000 - DNA, 22 bp, Artificial Sequence
  chemically synthesized
aataagctagtatttgtaaagg

SEQ ID NO: 43001 - DNA, 22 bp, Artificial Sequence
  chemically synthesized
gtatttgtaaaggacacacact

SEQ ID NO: 43002 - DNA, 22 bp, Artificial Sequence
  chemically synthesized
gtaaaggacacacacttacatt

SEQ ID NO: 43003 - DNA, 22 bp, Artificial Sequence
  chemically synthesized
taaaggacacacacttacattc

SEQ ID NO: 43004 - DNA, 22 bp, Artificial Sequence
  chemically synthesized
acattcacaatcacacacggtg

SEQ ID NO: 43005 - DNA, 22 bp, Artificial Sequence
  chemically synthesized
cattcacaatcacacacggtgt

SEQ ID NO: 43006 - DNA, 22 bp, Artificial Sequence
  chemically synthesized
acaatcacacacggtgtgtatg

SEQ ID NO: 43007 - DNA, 22 bp, Artificial Sequence
  chemically synthesized
acccactcaacaaataccctga

SEQ ID NO: 43008 - DNA, 22 bp, Artificial Sequence
  chemically synthesized
aacaaataccctgagtatttgt

SEQ ID NO: 43009 - DNA, 22 bp, Artificial Sequence
  chemically synthesized
agtatttgttgaatcattatat

SEQ ID NO: 43010 - DNA, 22 bp, Artificial Sequence
  chemically synthesized
gttgaatcattatatgcgtata

SEQ ID NO: 43011 - DNA, 22 bp, Artificial Sequence
  chemically synthesized
ttgaatcattatatgcgtatat

SEQ ID NO: 43012 - DNA, 22 bp, Artificial Sequence
  chemically synthesized
aatcattatatgcgtatatcat

SEQ ID NO: 43013 - DNA, 22 bp, Artificial Sequence
  chemically synthesized
tatgcgtatatcatctggcaaa

SEQ ID NO: 43014 - DNA, 22 bp, Artificial Sequence
  chemically synthesized
gcaaatggatgtgtataatttc

SEQ ID NO: 43015 - DNA, 22 bp, Artificial Sequence
  chemically synthesized
ctccagggataagaagcaaatg

SEQ ID NO: 43016 - DNA, 22 bp, Artificial Sequence
  chemically synthesized
tccagggataagaagcaaatgt

SEQ ID NO: 43017 - DNA, 22 bp, Artificial Sequence
  chemically synthesized
cagggataagaagcaaatgtat

SEQ ID NO: 43018 - DNA, 22 bp, Artificial Sequence
  chemically synthesized
actcaggccataacaaagagag

SEQ ID NO: 43019 - DNA, 22 bp, Artificial Sequence
  chemically synthesized
ctcaggccataacaaagagaga

SEQ ID NO: 43020 - DNA, 22 bp, Artificial Sequence
  chemically synthesized
aggccataacaaagagagaaat

SEQ ID NO: 43021 - DNA, 22 bp, Artificial Sequence
  chemically synthesized
agtcccactccatgaacaggtc

SEQ ID NO: 43022 - DNA, 22 bp, Artificial Sequence
  chemically synthesized
catgaacaggtcaaggaaccaa

SEQ ID NO: 43023 - DNA, 22 bp, Artificial Sequence
  chemically synthesized
aaagagttatttcattgtttca

SEQ ID NO: 43024 - DNA, 22 bp, Artificial Sequence
  chemically synthesized
tttcattgtttcaacttgctag

SEQ ID NO: 43025 - DNA, 22 bp, Artificial Sequence
  chemically synthesized
cattgtttcaacttgctagtga

SEQ ID NO: 43026 - DNA, 22 bp, Artificial Sequence
  chemically synthesized
attgtttcaacttgctagtgag

SEQ ID NO: 43027 - DNA, 22 bp, Artificial Sequence
  chemically synthesized
tttcaacttgctagtgagggga

SEQ ID NO: 43028 - DNA, 22 bp, Artificial Sequence
  chemically synthesized
caacttgctagtgaggggagca

SEQ ID NO: 43029 - DNA, 22 bp, Artificial Sequence
  chemically synthesized
aacttgctagtgaggggagcat

SEQ ID NO: 43030 - DNA, 22 bp, Artificial Sequence
  chemically synthesized
gctagtgaggggagcatggcac

SEQ ID NO: 43031 - DNA, 22 bp, Artificial Sequence
  chemically synthesized
ctagtgaggggagcatggcacc

SEQ ID NO: 43032 - DNA, 22 bp, Artificial Sequence
  chemically synthesized
gtgaggggagcatggcacctga

SEQ ID NO: 43033 - DNA, 22 bp, Artificial Sequence
  chemically synthesized
aacagagatgatataaattaat

SEQ ID NO: 43034 - DNA, 22 bp, Artificial Sequence
  chemically synthesized
atgaaactgagaaccaagcgaa

SEQ ID NO: 43035 - DNA, 22 bp, Artificial Sequence
  chemically synthesized
agaaccaagcgaagagcttagc

SEQ ID NO: 43036 - DNA, 22 bp, Artificial Sequence
  chemically synthesized
agccatcctttgcatagttagc

SEQ ID NO: 43037 - DNA, 22 bp, Artificial Sequence
  chemically synthesized
gccatcctttgcatagttagct

SEQ ID NO: 43038 - DNA, 22 bp, Artificial Sequence
  chemically synthesized
tgcatagttagctacaatggct

SEQ ID NO: 43039 - DNA, 22 bp, Artificial Sequence
  chemically synthesized
gcatagttagctacaatggcta

SEQ ID NO: 43040 - DNA, 22 bp, Artificial Sequence
  chemically synthesized
catagttagctacaatggctat

SEQ ID NO: 43041 - DNA, 22 bp, Artificial Sequence
  chemically synthesized
gctacaatggctatttattttt

SEQ ID NO: 43042 - DNA, 22 bp, Artificial Sequence
  chemically synthesized
caatggctatttatttttcagc

SEQ ID NO: 43043 - DNA, 22 bp, Artificial Sequence
  chemically synthesized
tttatttttcagccagactggc

SEQ ID NO: 43044 - DNA, 22 bp, Artificial Sequence
  chemically synthesized
atttttcagccagactggccat

SEQ ID NO: 43045 - DNA, 22 bp, Artificial Sequence
  chemically synthesized
tttttcagccagactggccatc

SEQ ID NO: 43046 - DNA, 22 bp, Artificial Sequence
  chemically synthesized
ttcagccagactggccatcatg

SEQ ID NO: 43047 - DNA, 22 bp, Artificial Sequence
  chemically synthesized
tcagccagactggccatcatgt

SEQ ID NO: 43048 - DNA, 22 bp, Artificial Sequence
  chemically synthesized
cagccagactggccatcatgta

SEQ ID NO: 43049 - DNA, 22 bp, Artificial Sequence
  chemically synthesized
agccagactggccatcatgtag

SEQ ID NO: 43050 - DNA, 22 bp, Artificial Sequence
  chemically synthesized
gccatcatgtaggcacactctt

SEQ ID NO: 43051 - DNA, 22 bp, Artificial Sequence
  chemically synthesized
ttttagattagaaaaatcaacc

SEQ ID NO: 43052 - DNA, 22 bp, Artificial Sequence
  chemically synthesized
ttagattagaaaaatcaaccat

SEQ ID NO: 43053 - DNA, 22 bp, Artificial Sequence
  chemically synthesized
tagattagaaaaatcaaccatt

SEQ ID NO: 43054 - DNA, 22 bp, Artificial Sequence
  chemically synthesized
agattagaaaaatcaaccatta

SEQ ID NO: 43055 - DNA, 22 bp, Artificial Sequence
  chemically synthesized
gattagaaaaatcaaccattat

SEQ ID NO: 43056 - DNA, 22 bp, Artificial Sequence
  chemically synthesized
gaaaaatcaaccattatttttt

SEQ ID NO: 43057 - DNA, 22 bp, Artificial Sequence
  chemically synthesized
ttttttctgcccattcattcca

SEQ ID NO: 43058 - DNA, 22 bp, Artificial Sequence
  chemically synthesized
tttctgcccattcattccagca

SEQ ID NO: 43059 - DNA, 22 bp, Artificial Sequence
  chemically synthesized
ttctgcccattcattccagcac

SEQ ID NO: 43060 - DNA, 22 bp, Artificial Sequence
  chemically synthesized
tctgcccattcattccagcacc

SEQ ID NO: 43061 - DNA, 22 bp, Artificial Sequence
  chemically synthesized
ctgcccattcattccagcaccg

SEQ ID NO: 43062 - DNA, 22 bp, Artificial Sequence
  chemically synthesized
tgcccattcattccagcaccgt

SEQ ID NO: 43063 - DNA, 22 bp, Artificial Sequence
  chemically synthesized
cccattcattccagcaccgtga

SEQ ID NO: 43064 - DNA, 22 bp, Artificial Sequence
  chemically synthesized
attccagcaccgtgacagtctt

SEQ ID NO: 43065 - DNA, 22 bp, Artificial Sequence
  chemically synthesized
cagcaccgtgacagtcttcacg

SEQ ID NO: 43066 - DNA, 22 bp, Artificial Sequence
  chemically synthesized
cacggggaaattaaacttattt

SEQ ID NO: 43067 - DNA, 22 bp, Artificial Sequence
  chemically synthesized
acggggaaattaaacttatttt

SEQ ID NO: 43068 - DNA, 22 bp, Artificial Sequence
  chemically synthesized
aacttatttttttaagaatttt

SEQ ID NO: 43069 - DNA, 22 bp, Artificial Sequence
  chemically synthesized
atttttttaagaatttttcaat

SEQ ID NO: 43070 - DNA, 22 bp, Artificial Sequence
  chemically synthesized
tttttttaagaatttttcaatc

SEQ ID NO: 43071 - DNA, 22 bp, Artificial Sequence
  chemically synthesized
ttttaagaatttttcaatcata

SEQ ID NO: 43072 - DNA, 22 bp, Artificial Sequence
  chemically synthesized
tttaagaatttttcaatcatat

SEQ ID NO: 43073 - DNA, 22 bp, Artificial Sequence
  chemically synthesized
ttaagaatttttcaatcatata

SEQ ID NO: 43074 - DNA, 22 bp, Artificial Sequence
  chemically synthesized
taagaatttttcaatcatatac

SEQ ID NO: 43075 - DNA, 22 bp, Artificial Sequence
  chemically synthesized
aagaatttttcaatcatataca

SEQ ID NO: 43076 - DNA, 22 bp, Artificial Sequence
  chemically synthesized
agaatttttcaatcatatacaa

SEQ ID NO: 43077 - DNA, 22 bp, Artificial Sequence
  chemically synthesized
ttcaatcatatacaagattttg

SEQ ID NO: 43078 - DNA, 22 bp, Artificial Sequence
  chemically synthesized
tcaatcatatacaagattttga

SEQ ID NO: 43079 - DNA, 22 bp, Artificial Sequence
  chemically synthesized
caatcatatacaagattttgaa

SEQ ID NO: 43080 - DNA, 22 bp, Artificial Sequence
  chemically synthesized
aatcatatacaagattttgaac

SEQ ID NO: 43081 - DNA, 22 bp, Artificial Sequence
  chemically synthesized
tgaactgggaatttcatgaatc

SEQ ID NO: 43082 - DNA, 22 bp, Artificial Sequence
  chemically synthesized
gaactgggaatttcatgaatca

SEQ ID NO: 43083 - DNA, 22 bp, Artificial Sequence
  chemically synthesized
aactgggaatttcatgaatcaa

SEQ ID NO: 43084 - DNA, 22 bp, Artificial Sequence
  chemically synthesized
ggaatttcatgaatcaaaaatt

SEQ ID NO: 43085 - DNA, 22 bp, Artificial Sequence
  chemically synthesized
catgaatcaaaaattaaatgaa

SEQ ID NO: 43086 - DNA, 22 bp, Artificial Sequence
  chemically synthesized
atgaatcaaaaattaaatgaat

SEQ ID NO: 43087 - DNA, 22 bp, Artificial Sequence
  chemically synthesized
aatgaattgcacataaagccat

SEQ ID NO: 43088 - DNA, 22 bp, Artificial Sequence
  chemically synthesized
cacataaagccatggcatatgt

SEQ ID NO: 43089 - DNA, 22 bp, Artificial Sequence
  chemically synthesized
ttactacattgtgggagaaaaa

SEQ ID NO: 43090 - DNA, 22 bp, Artificial Sequence
  chemically synthesized
tactacattgtgggagaaaaaa

SEQ ID NO: 43091 - DNA, 22 bp, Artificial Sequence
  chemically synthesized
actacattgtgggagaaaaaat

SEQ ID NO: 43092 - DNA, 22 bp, Artificial Sequence
  chemically synthesized
ctacattgtgggagaaaaaata

SEQ ID NO: 43093 - DNA, 22 bp, Artificial Sequence
  chemically synthesized
cattgtgggagaaaaaataatt

SEQ ID NO: 43094 - DNA, 22 bp, Artificial Sequence
  chemically synthesized
tgggagaaaaaataattcttat

SEQ ID NO: 43095 - DNA, 22 bp, Artificial Sequence
  chemically synthesized
ttataatttaaaaaaactatgt

SEQ ID NO: 43096 - DNA, 22 bp, Artificial Sequence
  chemically synthesized
ataatttaaaaaaactatgtct

SEQ ID NO: 43097 - DNA, 22 bp, Artificial Sequence
  chemically synthesized
taatttaaaaaaactatgtctt

SEQ ID NO: 43098 - DNA, 22 bp, Artificial Sequence
  chemically synthesized
aaaaaaactatgtcttacctga

SEQ ID NO: 43099 - DNA, 22 bp, Artificial Sequence
  chemically synthesized
aaaaaactatgtcttacctgat

SEQ ID NO: 43100 - DNA, 22 bp, Artificial Sequence
  chemically synthesized
tgtcttacctgatttcagaaat

SEQ ID NO: 43101 - DNA, 22 bp, Artificial Sequence
  chemically synthesized
acctgatttcagaaataaaaga

SEQ ID NO: 43102 - DNA, 22 bp, Artificial Sequence
  chemically synthesized
cctgatttcagaaataaaagaa

SEQ ID NO: 43103 - DNA, 22 bp, Artificial Sequence
  chemically synthesized
atttcagaaataaaagaagtag

SEQ ID NO: 43104 - DNA, 22 bp, Artificial Sequence
  chemically synthesized
cagaaataaaagaagtagaaga

SEQ ID NO: 43105 - DNA, 22 bp, Artificial Sequence
  chemically synthesized
agaaataaaagaagtagaagaa

SEQ ID NO: 43106 - DNA, 22 bp, Artificial Sequence
  chemically synthesized
ccttatgttccattttgggact

SEQ ID NO: 43107 - DNA, 22 bp, Artificial Sequence
  chemically synthesized
cttatgttccattttgggactg

SEQ ID NO: 43108 - DNA, 22 bp, Artificial Sequence
  chemically synthesized
atgttccattttgggactggcc

SEQ ID NO: 43109 - DNA, 22 bp, Artificial Sequence
  chemically synthesized
tgttccattttgggactggcca

SEQ ID NO: 43110 - DNA, 22 bp, Artificial Sequence
  chemically synthesized
cattttgggactggccagcagt

SEQ ID NO: 43111 - DNA, 22 bp, Artificial Sequence
  chemically synthesized
tgggactggccagcagtgccca

SEQ ID NO: 43112 - DNA, 22 bp, Artificial Sequence
  chemically synthesized
gggactggccagcagtgcccag

SEQ ID NO: 43113 - DNA, 22 bp, Artificial Sequence
  chemically synthesized
ggactggccagcagtgcccaga

SEQ ID NO: 43114 - DNA, 22 bp, Artificial Sequence
  chemically synthesized
gccagcagtgcccagaaagtgt

SEQ ID NO: 43115 - DNA, 22 bp, Artificial Sequence
  chemically synthesized
ttgacttacatgagagtaaacg

SEQ ID NO: 43116 - DNA, 22 bp, Artificial Sequence
  chemically synthesized
acttacatgagagtaaacgcac

SEQ ID NO: 43117 - DNA, 22 bp, Artificial Sequence
  chemically synthesized
acatgagagtaaacgcacccac

SEQ ID NO: 43118 - DNA, 22 bp, Artificial Sequence
  chemically synthesized
catgagagtaaacgcacccaca

SEQ ID NO: 43119 - DNA, 22 bp, Artificial Sequence
  chemically synthesized
agttaatgattctctcagagac

SEQ ID NO: 43120 - DNA, 22 bp, Artificial Sequence
  chemically synthesized
atgattctctcagagacccatg

SEQ ID NO: 43121 - DNA, 22 bp, Artificial Sequence
  chemically synthesized
tctcagagacccatgccactgg

SEQ ID NO: 43122 - DNA, 22 bp, Artificial Sequence
  chemically synthesized
tcagagacccatgccactggct

SEQ ID NO: 43123 - DNA, 22 bp, Artificial Sequence
  chemically synthesized
agagacccatgccactggctca

SEQ ID NO: 43124 - DNA, 22 bp, Artificial Sequence
  chemically synthesized
gctcagcagggttcaaacatta

SEQ ID NO: 43125 - DNA, 22 bp, Artificial Sequence
  chemically synthesized
agcagggttcaaacattacctt

SEQ ID NO: 43126 - DNA, 22 bp, Artificial Sequence
  chemically synthesized
aaacattaccttgaatatagag

SEQ ID NO: 43127 - DNA, 22 bp, Artificial Sequence
  chemically synthesized
ccttgaatatagagtcttataa

SEQ ID NO: 43128 - DNA, 22 bp, Artificial Sequence
  chemically synthesized
gaatatagagtcttataaaata

SEQ ID NO: 43129 - DNA, 22 bp, Artificial Sequence
  chemically synthesized
aatatagagtcttataaaatat

SEQ ID NO: 43130 - DNA, 22 bp, Artificial Sequence
  chemically synthesized
ataaaatatttgagagtgcaat

SEQ ID NO: 43131 - DNA, 22 bp, Artificial Sequence
  chemically synthesized
taaaatatttgagagtgcaatg

SEQ ID NO: 43132 - DNA, 22 bp, Artificial Sequence
  chemically synthesized
gagagtgcaatgtcaatagatg

SEQ ID NO: 43133 - DNA, 22 bp, Artificial Sequence
  chemically synthesized
agagtgcaatgtcaatagatgc

SEQ ID NO: 43134 - DNA, 22 bp, Artificial Sequence
  chemically synthesized
ggaagtggtgaaagccatttcc

SEQ ID NO: 43135 - DNA, 22 bp, Artificial Sequence
  chemically synthesized
cccccctcagctgctccacatt

SEQ ID NO: 43136 - DNA, 22 bp, Artificial Sequence
  chemically synthesized
ccccctcagctgctccacattg

SEQ ID NO: 43137 - DNA, 22 bp, Artificial Sequence
  chemically synthesized
agctgctccacattgcctttat

SEQ ID NO: 43138 - DNA, 22 bp, Artificial Sequence
  chemically synthesized
ctccacattgcctttatgtctc

SEQ ID NO: 43139 - DNA, 22 bp, Artificial Sequence
  chemically synthesized
cacattgcctttatgtctcctt

SEQ ID NO: 43140 - DNA, 22 bp, Artificial Sequence
  chemically synthesized
cctttatgtctccttactcctt

SEQ ID NO: 43141 - DNA, 22 bp, Artificial Sequence
  chemically synthesized
tatgtctccttactccttccct

SEQ ID NO: 43142 - DNA, 22 bp, Artificial Sequence
  chemically synthesized
atgtctccttactccttccctc

SEQ ID NO: 43143 - DNA, 22 bp, Artificial Sequence
  chemically synthesized
tgtctccttactccttccctca

SEQ ID NO: 43144 - DNA, 22 bp, Artificial Sequence
  chemically synthesized
cttactccttccctcaccccta

SEQ ID NO: 43145 - DNA, 22 bp, Artificial Sequence
  chemically synthesized
actccttccctcacccctagac

SEQ ID NO: 43146 - DNA, 22 bp, Artificial Sequence
  chemically synthesized
ctccttccctcacccctagacc

SEQ ID NO: 43147 - DNA, 22 bp, Artificial Sequence
  chemically synthesized
cttccctcacccctagaccttc

SEQ ID NO: 43148 - DNA, 22 bp, Artificial Sequence
  chemically synthesized
ccctcacccctagaccttcatc

SEQ ID NO: 43149 - DNA, 22 bp, Artificial Sequence
  chemically synthesized
cctcacccctagaccttcatct

SEQ ID NO: 43150 - DNA, 22 bp, Artificial Sequence
  chemically synthesized
acccctagaccttcatctttcc

SEQ ID NO: 43151 - DNA, 22 bp, Artificial Sequence
  chemically synthesized
gaccttcatctttcctgattag

SEQ ID NO: 43152 - DNA, 22 bp, Artificial Sequence
  chemically synthesized
catctttcctgattagtcttgt

SEQ ID NO: 43153 - DNA, 22 bp, Artificial Sequence
  chemically synthesized
atctttcctgattagtcttgtt

SEQ ID NO: 43154 - DNA, 22 bp, Artificial Sequence
  chemically synthesized
tcctgattagtcttgtttcctc

SEQ ID NO: 43155 - DNA, 22 bp, Artificial Sequence
  chemically synthesized
cctgattagtcttgtttcctcc

SEQ ID NO: 43156 - DNA, 22 bp, Artificial Sequence
  chemically synthesized
ctgattagtcttgtttcctccc

SEQ ID NO: 43157 - DNA, 22 bp, Artificial Sequence
  chemically synthesized
attagtcttgtttcctcccctc

SEQ ID NO: 43158 - DNA, 22 bp, Artificial Sequence
  chemically synthesized
gtcttgtttcctcccctcttct

SEQ ID NO: 43159 - DNA, 22 bp, Artificial Sequence
  chemically synthesized
gtttcctcccctcttctttcat

SEQ ID NO: 43160 - DNA, 22 bp, Artificial Sequence
  chemically synthesized
tttcctcccctcttctttcatt

SEQ ID NO: 43161 - DNA, 22 bp, Artificial Sequence
  chemically synthesized
cctcccctcttctttcattctc

SEQ ID NO: 43162 - DNA, 22 bp, Artificial Sequence
  chemically synthesized
ctcccctcttctttcattctct

SEQ ID NO: 43163 - DNA, 22 bp, Artificial Sequence
  chemically synthesized
ccctcttctttcattctctttc

SEQ ID NO: 43164 - DNA, 22 bp, Artificial Sequence
  chemically synthesized
ttctttcattctctttcttttg

SEQ ID NO: 43165 - DNA, 22 bp, Artificial Sequence
  chemically synthesized
ctttcattctctttcttttgga

SEQ ID NO: 43166 - DNA, 22 bp, Artificial Sequence
  chemically synthesized
tttcattctctttcttttggat

SEQ ID NO: 43167 - DNA, 22 bp, Artificial Sequence
  chemically synthesized
tcattctctttcttttggataa

SEQ ID NO: 43168 - DNA, 22 bp, Artificial Sequence
  chemically synthesized
cattctctttcttttggataaa

SEQ ID NO: 43169 - DNA, 22 bp, Artificial Sequence
  chemically synthesized
attctctttcttttggataaaa

SEQ ID NO: 43170 - DNA, 22 bp, Artificial Sequence
  chemically synthesized
tctttcttttggataaaataaa

SEQ ID NO: 43171 - DNA, 22 bp, Artificial Sequence
  chemically synthesized
tttcttttggataaaataaaat

SEQ ID NO: 43172 - DNA, 22 bp, Artificial Sequence
  chemically synthesized
tcttttggataaaataaaatca

SEQ ID NO: 43173 - DNA, 22 bp, Artificial Sequence
  chemically synthesized
cttttggataaaataaaatcat

SEQ ID NO: 43174 - DNA, 22 bp, Artificial Sequence
  chemically synthesized
ttttggataaaataaaatcata

SEQ ID NO: 43175 - DNA, 22 bp, Artificial Sequence
  chemically synthesized
ttggataaaataaaatcataaa

SEQ ID NO: 43176 - DNA, 22 bp, Artificial Sequence
  chemically synthesized
tggataaaataaaatcataaaa

SEQ ID NO: 43177 - DNA, 22 bp, Artificial Sequence
  chemically synthesized
ggataaaataaaatcataaaag

SEQ ID NO: 43178 - DNA, 22 bp, Artificial Sequence
  chemically synthesized
gataaaataaaatcataaaagt

SEQ ID NO: 43179 - DNA, 22 bp, Artificial Sequence
  chemically synthesized
atatttgctggtaacttccatg

SEQ ID NO: 43180 - DNA, 22 bp, Artificial Sequence
  chemically synthesized
gctggtaacttccatgaccaga

SEQ ID NO: 43181 - DNA, 22 bp, Artificial Sequence
  chemically synthesized
ctggtaacttccatgaccagac

SEQ ID NO: 43182 - DNA, 22 bp, Artificial Sequence
  chemically synthesized
gtaacttccatgaccagaccct

SEQ ID NO: 43183 - DNA, 22 bp, Artificial Sequence
  chemically synthesized
ccatgaccagaccctctgccaa

SEQ ID NO: 43184 - DNA, 22 bp, Artificial Sequence
  chemically synthesized
catgaccagaccctctgccaag

SEQ ID NO: 43185 - DNA, 22 bp, Artificial Sequence
  chemically synthesized
tgccaagtgctgcacatccata

SEQ ID NO: 43186 - DNA, 22 bp, Artificial Sequence
  chemically synthesized
ccaagtgctgcacatccatagc

SEQ ID NO: 43187 - DNA, 22 bp, Artificial Sequence
  chemically synthesized
cacatccatagcctccctcaag

SEQ ID NO: 43188 - DNA, 22 bp, Artificial Sequence
  chemically synthesized
cctcaagctttccaacaggcag

SEQ ID NO: 43189 - DNA, 22 bp, Artificial Sequence
  chemically synthesized
aagctttccaacaggcagtgct

SEQ ID NO: 43190 - DNA, 22 bp, Artificial Sequence
  chemically synthesized
tccaacaggcagtgctgtacga

SEQ ID NO: 43191 - DNA, 22 bp, Artificial Sequence
  chemically synthesized
ccaacaggcagtgctgtacgag

SEQ ID NO: 43192 - DNA, 22 bp, Artificial Sequence
  chemically synthesized
caacaggcagtgctgtacgagg

SEQ ID NO: 43193 - DNA, 22 bp, Artificial Sequence
  chemically synthesized
tacgaggagggggctgaggcct

SEQ ID NO: 43194 - DNA, 22 bp, Artificial Sequence
  chemically synthesized
aggccttcccgaggttgtgtcg

SEQ ID NO: 43195 - DNA, 22 bp, Artificial Sequence
  chemically synthesized
cccgaggttgtgtcgctaccca

SEQ ID NO: 43196 - DNA, 22 bp, Artificial Sequence
  chemically synthesized
ccgaggttgtgtcgctacccag

SEQ ID NO: 43197 - DNA, 22 bp, Artificial Sequence
  chemically synthesized
tgtcgctacccaggggtgcagc

SEQ ID NO: 43198 - DNA, 22 bp, Artificial Sequence
  chemically synthesized
cccaggggtgcagctgatagac

SEQ ID NO: 43199 - DNA, 22 bp, Artificial Sequence
  chemically synthesized
atagacacaaccctttcaggtc

SEQ ID NO: 43200 - DNA, 22 bp, Artificial Sequence
  chemically synthesized
tcaggtcttagtttacgagcaa

SEQ ID NO: 43201 - DNA, 22 bp, Artificial Sequence
  chemically synthesized
caggtcttagtttacgagcaag

SEQ ID NO: 43202 - DNA, 22 bp, Artificial Sequence
  chemically synthesized
aggtcttagtttacgagcaagc

SEQ ID NO: 43203 - DNA, 22 bp, Artificial Sequence
  chemically synthesized
agtttacgagcaagctaggtat

SEQ ID NO: 43204 - DNA, 22 bp, Artificial Sequence
  chemically synthesized
gtttacgagcaagctaggtata

SEQ ID NO: 43205 - DNA, 22 bp, Artificial Sequence
  chemically synthesized
acgagcaagctaggtataaatg

SEQ ID NO: 43206 - DNA, 22 bp, Artificial Sequence
  chemically synthesized
cgagcaagctaggtataaatgt

SEQ ID NO: 43207 - DNA, 22 bp, Artificial Sequence
  chemically synthesized
ggtataaatgttaacatctcca

SEQ ID NO: 43208 - DNA, 22 bp, Artificial Sequence
  chemically synthesized
acatctccacatcctataccaa

SEQ ID NO: 43209 - DNA, 22 bp, Artificial Sequence
  chemically synthesized
cacatcctataccaaactgtgc

SEQ ID NO: 43210 - DNA, 22 bp, Artificial Sequence
  chemically synthesized
taccaaactgtgccgaaatgac

SEQ ID NO: 43211 - DNA, 22 bp, Artificial Sequence
  chemically synthesized
tgccgaaatgacaacataagtg

SEQ ID NO: 43212 - DNA, 22 bp, Artificial Sequence
  chemically synthesized
ttattatcttcaaaatttattt

SEQ ID NO: 43213 - DNA, 22 bp, Artificial Sequence
  chemically synthesized
tattatcttcaaaatttattta

SEQ ID NO: 43214 - DNA, 22 bp, Artificial Sequence
  chemically synthesized
attatcttcaaaatttatttat

SEQ ID NO: 43215 - DNA, 22 bp, Artificial Sequence
  chemically synthesized
ttatcttcaaaatttatttatt

SEQ ID NO: 43216 - DNA, 22 bp, Artificial Sequence
  chemically synthesized
tcttcaaaatttatttattcct

SEQ ID NO: 43217 - DNA, 22 bp, Artificial Sequence
  chemically synthesized
caaaatttatttattcctagtg

SEQ ID NO: 43218 - DNA, 22 bp, Artificial Sequence
  chemically synthesized
aaaatttatttattcctagtga

SEQ ID NO: 43219 - DNA, 22 bp, Artificial Sequence
  chemically synthesized
atttattcctagtgaactcaca

SEQ ID NO: 43220 - DNA, 22 bp, Artificial Sequence
  chemically synthesized
tttattcctagtgaactcacat

SEQ ID NO: 43221 - DNA, 22 bp, Artificial Sequence
  chemically synthesized
attcctagtgaactcacatgtt

SEQ ID NO: 43222 - DNA, 22 bp, Artificial Sequence
  chemically synthesized
ttcctagtgaactcacatgttt

SEQ ID NO: 43223 - DNA, 22 bp, Artificial Sequence
  chemically synthesized
ctagtgaactcacatgttttct

SEQ ID NO: 43224 - DNA, 22 bp, Artificial Sequence
  chemically synthesized
gtgaactcacatgttttctgta

SEQ ID NO: 43225 - DNA, 22 bp, Artificial Sequence
  chemically synthesized
acatgttttctgtaattataaa

SEQ ID NO: 43226 - DNA, 22 bp, Artificial Sequence
  chemically synthesized
tctgtaattataaattatgtta

SEQ ID NO: 43227 - DNA, 22 bp, Artificial Sequence
  chemically synthesized
ctgtaattataaattatgttat

SEQ ID NO: 43228 - DNA, 22 bp, Artificial Sequence
  chemically synthesized
tgtaattataaattatgttata

SEQ ID NO: 43229 - DNA, 22 bp, Artificial Sequence
  chemically synthesized
taattataaattatgttataag

SEQ ID NO: 43230 - DNA, 22 bp, Artificial Sequence
  chemically synthesized
taaattatgttataagatatca

SEQ ID NO: 43231 - DNA, 22 bp, Artificial Sequence
  chemically synthesized
tgttataagatatcaatccttc

SEQ ID NO: 43232 - DNA, 22 bp, Artificial Sequence
  chemically synthesized
taagatatcaatccttccagga

SEQ ID NO: 43233 - DNA, 22 bp, Artificial Sequence
  chemically synthesized
ccaggagggggtggtggctcat

SEQ ID NO: 43234 - DNA, 22 bp, Artificial Sequence
  chemically synthesized
caggagggggtggtggctcatg

SEQ ID NO: 43235 - DNA, 22 bp, Artificial Sequence
  chemically synthesized
atgcctataatcccagcatttt

SEQ ID NO: 43236 - DNA, 22 bp, Artificial Sequence
  chemically synthesized
taatcccagcattttgggaggc

SEQ ID NO: 43237 - DNA, 22 bp, Artificial Sequence
  chemically synthesized
tgggaggccacggcagatggat

SEQ ID NO: 43238 - DNA, 22 bp, Artificial Sequence
  chemically synthesized
gggaggccacggcagatggatc

SEQ ID NO: 43239 - DNA, 22 bp, Artificial Sequence
  chemically synthesized
ggaggccacggcagatggatca

SEQ ID NO: 43240 - DNA, 22 bp, Artificial Sequence
  chemically synthesized
aggccaggagtttgagacaagc

SEQ ID NO: 43241 - DNA, 22 bp, Artificial Sequence
  chemically synthesized
gagacaagcctgggcaacatgc

SEQ ID NO: 43242 - DNA, 22 bp, Artificial Sequence
  chemically synthesized
agacaagcctgggcaacatgcc

SEQ ID NO: 43243 - DNA, 22 bp, Artificial Sequence
  chemically synthesized
ggcaacatgccaaaaccctgtc

SEQ ID NO: 43244 - DNA, 22 bp, Artificial Sequence
  chemically synthesized
tctctacaaaaaatacaaaaat

SEQ ID NO: 43245 - DNA, 22 bp, Artificial Sequence
  chemically synthesized
tacaaaaaatacaaaaattagc

SEQ ID NO: 43246 - DNA, 22 bp, Artificial Sequence
  chemically synthesized
caaaaaatacaaaaattagctg

SEQ ID NO: 43247 - DNA, 22 bp, Artificial Sequence
  chemically synthesized
gctgggtgtggaggcacatgcc

SEQ ID NO: 43248 - DNA, 22 bp, Artificial Sequence
  chemically synthesized
ggtgtggaggcacatgccagtc

SEQ ID NO: 43249 - DNA, 22 bp, Artificial Sequence
  chemically synthesized
ctaagtaggctgaggcactaga

SEQ ID NO: 43250 - DNA, 22 bp, Artificial Sequence
  chemically synthesized
agtaggctgaggcactagaatt

SEQ ID NO: 43251 - DNA, 22 bp, Artificial Sequence
  chemically synthesized
aggcactagaattgcttgaaca

SEQ ID NO: 43252 - DNA, 22 bp, Artificial Sequence
  chemically synthesized
gaattgcttgaacacaggagat

SEQ ID NO: 43253 - DNA, 22 bp, Artificial Sequence
  chemically synthesized
cttgaacacaggagatggaggt

SEQ ID NO: 43254 - DNA, 22 bp, Artificial Sequence
  chemically synthesized
gaacacaggagatggaggttgc

SEQ ID NO: 43255 - DNA, 22 bp, Artificial Sequence
  chemically synthesized
aacacaggagatggaggttgca

SEQ ID NO: 43256 - DNA, 22 bp, Artificial Sequence
  chemically synthesized
cagtgagccaagaatgtgccac

SEQ ID NO: 43257 - DNA, 22 bp, Artificial Sequence
  chemically synthesized
cactccagcctgggtgacagag

SEQ ID NO: 43258 - DNA, 22 bp, Artificial Sequence
  chemically synthesized
cagcctgggtgacagagcaaga

SEQ ID NO: 43259 - DNA, 22 bp, Artificial Sequence
  chemically synthesized
ggtgacagagcaagaatgtctc

SEQ ID NO: 43260 - DNA, 22 bp, Artificial Sequence
  chemically synthesized
aggaaagaaaaaaaaataataa

SEQ ID NO: 43261 - DNA, 22 bp, Artificial Sequence
  chemically synthesized
ataaaatatcaatccttcctat

SEQ ID NO: 43262 - DNA, 22 bp, Artificial Sequence
  chemically synthesized
cctattctagtagttgtggctt

SEQ ID NO: 43263 - DNA, 22 bp, Artificial Sequence
  chemically synthesized
ctattctagtagttgtggctta

SEQ ID NO: 43264 - DNA, 22 bp, Artificial Sequence
  chemically synthesized
ttctagtagttgtggcttaaat

SEQ ID NO: 43265 - DNA, 22 bp, Artificial Sequence
  chemically synthesized
tagtagttgtggcttaaataaa

SEQ ID NO: 43266 - DNA, 22 bp, Artificial Sequence
  chemically synthesized
gtagttgtggcttaaataaata

SEQ ID NO: 43267 - DNA, 22 bp, Artificial Sequence
  chemically synthesized
tggcttaaataaataaataaat

SEQ ID NO: 43268 - DNA, 22 bp, Artificial Sequence
  chemically synthesized
aaataaataaataaatattttt

SEQ ID NO: 43269 - DNA, 22 bp, Artificial Sequence
  chemically synthesized
aataaataaataaatattttta

SEQ ID NO: 43270 - DNA, 22 bp, Artificial Sequence
  chemically synthesized
ttaaaaataaaacatagggtcg

SEQ ID NO: 43271 - DNA, 22 bp, Artificial Sequence
  chemically synthesized
taaaaataaaacatagggtcga

SEQ ID NO: 43272 - DNA, 22 bp, Artificial Sequence
  chemically synthesized
aaaaataaaacatagggtcgag

SEQ ID NO: 43273 - DNA, 22 bp, Artificial Sequence
  chemically synthesized
aaaataaaacatagggtcgagt

SEQ ID NO: 43274 - DNA, 22 bp, Artificial Sequence
  chemically synthesized
aactctgtaatcccagcacttt

SEQ ID NO: 43275 - DNA, 22 bp, Artificial Sequence
  chemically synthesized
tgtaatcccagcactttgggag

SEQ ID NO: 43276 - DNA, 22 bp, Artificial Sequence
  chemically synthesized
taatcccagcactttgggaggc

SEQ ID NO: 43277 - DNA, 22 bp, Artificial Sequence
  chemically synthesized
tgggaggccaagacaggtggat

SEQ ID NO: 43278 - DNA, 22 bp, Artificial Sequence
  chemically synthesized
gggaggccaagacaggtggatc

SEQ ID NO: 43279 - DNA, 22 bp, Artificial Sequence
  chemically synthesized
ggaggccaagacaggtggatca

SEQ ID NO: 43280 - DNA, 22 bp, Artificial Sequence
  chemically synthesized
gagaccagccaggccaatgtgg

SEQ ID NO: 43281 - DNA, 22 bp, Artificial Sequence
  chemically synthesized
agaccagccaggccaatgtggt

SEQ ID NO: 43282 - DNA, 22 bp, Artificial Sequence
  chemically synthesized
tactaaaaatacaaaaattagc

SEQ ID NO: 43283 - DNA, 22 bp, Artificial Sequence
  chemically synthesized
ctaaaaatacaaaaattagcca

SEQ ID NO: 43284 - DNA, 22 bp, Artificial Sequence
  chemically synthesized
aaaatacaaaaattagccaggc

SEQ ID NO: 43285 - DNA, 22 bp, Artificial Sequence
  chemically synthesized
gccaggcgtggtggtgggcacc

SEQ ID NO: 43286 - DNA, 22 bp, Artificial Sequence
  chemically synthesized
taatcccagctactagggaggc

SEQ ID NO: 43287 - DNA, 22 bp, Artificial Sequence
  chemically synthesized
ctagggaggctggagtattcac

SEQ ID NO: 43288 - DNA, 22 bp, Artificial Sequence
  chemically synthesized
gggaggctggagtattcacttg

SEQ ID NO: 43289 - DNA, 22 bp, Artificial Sequence
  chemically synthesized
gagtattcacttgaacccagga

SEQ ID NO: 43290 - DNA, 22 bp, Artificial Sequence
  chemically synthesized
acttgaacccaggaggtggaag

SEQ ID NO: 43291 - DNA, 22 bp, Artificial Sequence
  chemically synthesized
gaacccaggaggtggaagttgc

SEQ ID NO: 43292 - DNA, 22 bp, Artificial Sequence
  chemically synthesized
aacccaggaggtggaagttgca

SEQ ID NO: 43293 - DNA, 22 bp, Artificial Sequence
  chemically synthesized
cagtgagccaaaatcacgtcag

SEQ ID NO: 43294 - DNA, 22 bp, Artificial Sequence
  chemically synthesized
caaccggggtgagagtctcaat

SEQ ID NO: 43295 - DNA, 22 bp, Artificial Sequence
  chemically synthesized
aaccggggtgagagtctcaata

SEQ ID NO: 43296 - DNA, 22 bp, Artificial Sequence
  chemically synthesized
aataaaataaaataaaataaaa

SEQ ID NO: 43297 - DNA, 22 bp, Artificial Sequence
  chemically synthesized
tccgcaaatgaattcatggtgc

SEQ ID NO: 43298 - DNA, 22 bp, Artificial Sequence
  chemically synthesized
ccgcaaatgaattcatggtgca

SEQ ID NO: 43299 - DNA, 22 bp, Artificial Sequence
  chemically synthesized
cgcaaatgaattcatggtgcaa

SEQ ID NO: 43300 - DNA, 22 bp, Artificial Sequence
  chemically synthesized
atggtgcaatcttacattttcg

SEQ ID NO: 43301 - DNA, 22 bp, Artificial Sequence
  chemically synthesized
acattttcgttctcatgaagta

SEQ ID NO: 43302 - DNA, 22 bp, Artificial Sequence
  chemically synthesized
cattttcgttctcatgaagtaa

SEQ ID NO: 43303 - DNA, 22 bp, Artificial Sequence
  chemically synthesized
tcgttctcatgaagtaaagcaa

SEQ ID NO: 43304 - DNA, 22 bp, Artificial Sequence
  chemically synthesized
cgttctcatgaagtaaagcaag

SEQ ID NO: 43305 - DNA, 22 bp, Artificial Sequence
  chemically synthesized
gttctcatgaagtaaagcaaga

SEQ ID NO: 43306 - DNA, 22 bp, Artificial Sequence
  chemically synthesized
tcatgaagtaaagcaagagtgg

SEQ ID NO: 43307 - DNA, 22 bp, Artificial Sequence
  chemically synthesized
atgaagtaaagcaagagtggta

SEQ ID NO: 43308 - DNA, 22 bp, Artificial Sequence
  chemically synthesized
agtggaaagagtctatctctag

SEQ ID NO: 43309 - DNA, 22 bp, Artificial Sequence
  chemically synthesized
tctctagtgtagtcacgtcagt

SEQ ID NO: 43310 - DNA, 22 bp, Artificial Sequence
  chemically synthesized
tagtgtagtcacgtcagtggtt

SEQ ID NO: 43311 - DNA, 22 bp, Artificial Sequence
  chemically synthesized
gtgtagtcacgtcagtggttgt

SEQ ID NO: 43312 - DNA, 22 bp, Artificial Sequence
  chemically synthesized
tgtcaagatggttaggaggctc

SEQ ID NO: 43313 - DNA, 22 bp, Artificial Sequence
  chemically synthesized
ggaggctcctcccgtttaaaac

SEQ ID NO: 43314 - DNA, 22 bp, Artificial Sequence
  chemically synthesized
ctcccgtttaaaacagtatcca

SEQ ID NO: 43315 - DNA, 22 bp, Artificial Sequence
  chemically synthesized
ccgtttaaaacagtatccaagc

SEQ ID NO: 43316 - DNA, 22 bp, Artificial Sequence
  chemically synthesized
aaaacagtatccaagccccagt

SEQ ID NO: 43317 - DNA, 22 bp, Artificial Sequence
  chemically synthesized
aaacagtatccaagccccagtt

SEQ ID NO: 43318 - DNA, 22 bp, Artificial Sequence
  chemically synthesized
taaatcaattggggagacacgc

SEQ ID NO: 43319 - DNA, 22 bp, Artificial Sequence
  chemically synthesized
gggagacacgccaactctgatc

SEQ ID NO: 43320 - DNA, 22 bp, Artificial Sequence
  chemically synthesized
tgatcatcagcaatatctgagc

SEQ ID NO: 43321 - DNA, 22 bp, Artificial Sequence
  chemically synthesized
atcatcagcaatatctgagctc

SEQ ID NO: 43322 - DNA, 22 bp, Artificial Sequence
  chemically synthesized
agctccagtctcagatattgtg

SEQ ID NO: 43323 - DNA, 22 bp, Artificial Sequence
  chemically synthesized
cagtctcagatattgtgtgcag

SEQ ID NO: 43324 - DNA, 22 bp, Artificial Sequence
  chemically synthesized
agatattgtgtgcagttagtct

SEQ ID NO: 43325 - DNA, 22 bp, Artificial Sequence
  chemically synthesized
tgtgcagttagtctctgtcctg

SEQ ID NO: 43326 - DNA, 22 bp, Artificial Sequence
  chemically synthesized
gtctctgtcctgtaccctctac

SEQ ID NO: 43327 - DNA, 22 bp, Artificial Sequence
  chemically synthesized
tgtcctgtaccctctacctcct

SEQ ID NO: 43328 - DNA, 22 bp, Artificial Sequence
  chemically synthesized
tcctgtaccctctacctccttc

SEQ ID NO: 43329 - DNA, 22 bp, Artificial Sequence
  chemically synthesized
taccctctacctccttccctac

SEQ ID NO: 43330 - DNA, 22 bp, Artificial Sequence
  chemically synthesized
tacctccttccctaccagaaaa

SEQ ID NO: 43331 - DNA, 22 bp, Artificial Sequence
  chemically synthesized
cctccttccctaccagaaaaat

SEQ ID NO: 43332 - DNA, 22 bp, Artificial Sequence
  chemically synthesized
cttccctaccagaaaaatcacc

SEQ ID NO: 43333 - DNA, 22 bp, Artificial Sequence
  chemically synthesized
ccctaccagaaaaatcaccact

SEQ ID NO: 43334 - DNA, 22 bp, Artificial Sequence
  chemically synthesized
cctaccagaaaaatcaccactt

SEQ ID NO: 43335 - DNA, 22 bp, Artificial Sequence
  chemically synthesized
ccagaaaaatcaccactttagt

SEQ ID NO: 43336 - DNA, 22 bp, Artificial Sequence
  chemically synthesized
tagtccctggccaccgggacac

SEQ ID NO: 43337 - DNA, 22 bp, Artificial Sequence
  chemically synthesized
agtccctggccaccgggacacc

SEQ ID NO: 43338 - DNA, 22 bp, Artificial Sequence
  chemically synthesized
gtccctggccaccgggacaccc

SEQ ID NO: 43339 - DNA, 22 bp, Artificial Sequence
  chemically synthesized
gccaccgggacaccccaggagg

SEQ ID NO: 43340 - DNA, 22 bp, Artificial Sequence
  chemically synthesized
aggtagttatggcacttatggc

SEQ ID NO: 43341 - DNA, 22 bp, Artificial Sequence
  chemically synthesized
tggcacttatggctcccttgct

SEQ ID NO: 43342 - DNA, 22 bp, Artificial Sequence
  chemically synthesized
atggctcccttgctgctgatct

SEQ ID NO: 43343 - DNA, 22 bp, Artificial Sequence
  chemically synthesized
tggctcccttgctgctgatctg

SEQ ID NO: 43344 - DNA, 22 bp, Artificial Sequence
  chemically synthesized
ccttgctgctgatctggaactc

SEQ ID NO: 43345 - DNA, 22 bp, Artificial Sequence
  chemically synthesized
gctgctgatctggaactcaagc

SEQ ID NO: 43346 - DNA, 22 bp, Artificial Sequence
  chemically synthesized
ctgctgatctggaactcaagcc

SEQ ID NO: 43347 - DNA, 22 bp, Artificial Sequence
  chemically synthesized
ctgatctggaactcaagcccca

SEQ ID NO: 43348 - DNA, 22 bp, Artificial Sequence
  chemically synthesized
atctggaactcaagccccaaga

SEQ ID NO: 43349 - DNA, 22 bp, Artificial Sequence
  chemically synthesized
gaactcaagccccaagaagtcc

SEQ ID NO: 43350 - DNA, 22 bp, Artificial Sequence
  chemically synthesized
aagccccaagaagtccccttgg

SEQ ID NO: 43351 - DNA, 22 bp, Artificial Sequence
  chemically synthesized
ggatgatctgaatatacatttg

SEQ ID NO: 43352 - DNA, 22 bp, Artificial Sequence
  chemically synthesized
gatgatctgaatatacatttgg

SEQ ID NO: 43353 - DNA, 22 bp, Artificial Sequence
  chemically synthesized
aatatacatttgggacagatct

SEQ ID NO: 43354 - DNA, 22 bp, Artificial Sequence
  chemically synthesized
gggacagatctagggagtttct

SEQ ID NO: 43355 - DNA, 22 bp, Artificial Sequence
  chemically synthesized
ggacagatctagggagtttctg

SEQ ID NO: 43356 - DNA, 22 bp, Artificial Sequence
  chemically synthesized
gggagtttctgagcaacactta

SEQ ID NO: 43357 - DNA, 22 bp, Artificial Sequence
  chemically synthesized
ctgagcaacacttagactgggg

SEQ ID NO: 43358 - DNA, 22 bp, Artificial Sequence
  chemically synthesized
tgagcaacacttagactggggt

SEQ ID NO: 43359 - DNA, 22 bp, Artificial Sequence
  chemically synthesized
agcaacacttagactggggtct

SEQ ID NO: 43360 - DNA, 22 bp, Artificial Sequence
  chemically synthesized
agactggggtcttccattgatt

SEQ ID NO: 43361 - DNA, 22 bp, Artificial Sequence
  chemically synthesized
gactggggtcttccattgatta

SEQ ID NO: 43362 - DNA, 22 bp, Artificial Sequence
  chemically synthesized
gggtcttccattgattaaatcc

SEQ ID NO: 43363 - DNA, 22 bp, Artificial Sequence
  chemically synthesized
ccattgattaaatcctacttga

SEQ ID NO: 43364 - DNA, 22 bp, Artificial Sequence
  chemically synthesized
cattgattaaatcctacttgaa

SEQ ID NO: 43365 - DNA, 22 bp, Artificial Sequence
  chemically synthesized
attaaatcctacttgaattcgc

SEQ ID NO: 43366 - DNA, 22 bp, Artificial Sequence
  chemically synthesized
aatcctacttgaattcgctact

SEQ ID NO: 43367 - DNA, 22 bp, Artificial Sequence
  chemically synthesized
cttgaattcgctactttgggac

SEQ ID NO: 43368 - DNA, 22 bp, Artificial Sequence
  chemically synthesized
gaattcgctactttgggactca

SEQ ID NO: 43369 - DNA, 22 bp, Artificial Sequence
  chemically synthesized
aattcgctactttgggactcaa

SEQ ID NO: 43370 - DNA, 22 bp, Artificial Sequence
  chemically synthesized
gctactttgggactcaagtcta

SEQ ID NO: 43371 - DNA, 22 bp, Artificial Sequence
  chemically synthesized
ctttgggactcaagtctaaggg

SEQ ID NO: 43372 - DNA, 22 bp, Artificial Sequence
  chemically synthesized
tgggactcaagtctaagggact

SEQ ID NO: 43373 - DNA, 22 bp, Artificial Sequence
  chemically synthesized
gggactcaagtctaagggactg

SEQ ID NO: 43374 - DNA, 22 bp, Artificial Sequence
  chemically synthesized
ggactcaagtctaagggactga

SEQ ID NO: 43375 - DNA, 22 bp, Artificial Sequence
  chemically synthesized
aagtctaagggactgagactga

SEQ ID NO: 43376 - DNA, 22 bp, Artificial Sequence
  chemically synthesized
agggactgagactgagacagga

SEQ ID NO: 43377 - DNA, 22 bp, Artificial Sequence
  chemically synthesized
agactgagacaggagagcacaa

SEQ ID NO: 43378 - DNA, 22 bp, Artificial Sequence
  chemically synthesized
agacaggagagcacaagactaa

SEQ ID NO: 43379 - DNA, 22 bp, Artificial Sequence
  chemically synthesized
actttggtctcttgatcttttc

SEQ ID NO: 43380 - DNA, 22 bp, Artificial Sequence
  chemically synthesized
tggtctcttgatcttttcttac

SEQ ID NO: 43381 - DNA, 22 bp, Artificial Sequence
  chemically synthesized
ggtctcttgatcttttcttacc

SEQ ID NO: 43382 - DNA, 22 bp, Artificial Sequence
  chemically synthesized
gtctcttgatcttttcttacct

SEQ ID NO: 43383 - DNA, 22 bp, Artificial Sequence
  chemically synthesized
ttgatcttttcttaccttgcaa

SEQ ID NO: 43384 - DNA, 22 bp, Artificial Sequence
  chemically synthesized
gatcttttcttaccttgcaact

SEQ ID NO: 43385 - DNA, 22 bp, Artificial Sequence
  chemically synthesized
atcttttcttaccttgcaactg

SEQ ID NO: 43386 - DNA, 22 bp, Artificial Sequence
  chemically synthesized
ttcttaccttgcaactgtcaat

SEQ ID NO: 43387 - DNA, 22 bp, Artificial Sequence
  chemically synthesized
tcttaccttgcaactgtcaatg

SEQ ID NO: 43388 - DNA, 22 bp, Artificial Sequence
  chemically synthesized
cttaccttgcaactgtcaatgc

SEQ ID NO: 43389 - DNA, 22 bp, Artificial Sequence
  chemically synthesized
ttaccttgcaactgtcaatgcc

SEQ ID NO: 43390 - DNA, 22 bp, Artificial Sequence
  chemically synthesized
accttgcaactgtcaatgcctc

SEQ ID NO: 43391 - DNA, 22 bp, Artificial Sequence
  chemically synthesized
ccttgcaactgtcaatgcctcc

SEQ ID NO: 43392 - DNA, 22 bp, Artificial Sequence
  chemically synthesized
gcaactgtcaatgcctccagcc

SEQ ID NO: 43393 - DNA, 22 bp, Artificial Sequence
  chemically synthesized
caactgtcaatgcctccagcca

SEQ ID NO: 43394 - DNA, 22 bp, Artificial Sequence
  chemically synthesized
tcaatgcctccagccaaatgcc

SEQ ID NO: 43395 - DNA, 22 bp, Artificial Sequence
  chemically synthesized
cagccaaatgcccagcacagag

SEQ ID NO: 43396 - DNA, 22 bp, Artificial Sequence
  chemically synthesized
agtggatttgactcttccattc

SEQ ID NO: 43397 - DNA, 22 bp, Artificial Sequence
  chemically synthesized
gactcttccattcagaaactca

SEQ ID NO: 43398 - DNA, 22 bp, Artificial Sequence
  chemically synthesized
actcttccattcagaaactcat

SEQ ID NO: 43399 - DNA, 22 bp, Artificial Sequence
  chemically synthesized
ttccattcagaaactcatagcg

SEQ ID NO: 43400 - DNA, 22 bp, Artificial Sequence
  chemically synthesized
ccattcagaaactcatagcgat

SEQ ID NO: 43401 - DNA, 22 bp, Artificial Sequence
  chemically synthesized
cattcagaaactcatagcgatt

SEQ ID NO: 43402 - DNA, 22 bp, Artificial Sequence
  chemically synthesized
agaaactcatagcgattgcaca

SEQ ID NO: 43403 - DNA, 22 bp, Artificial Sequence
  chemically synthesized
atagcgattgcacacttcattc

SEQ ID NO: 43404 - DNA, 22 bp, Artificial Sequence
  chemically synthesized
cacacttcattctcaatcacag

SEQ ID NO: 43405 - DNA, 22 bp, Artificial Sequence
  chemically synthesized
cattctcaatcacagggagctg

SEQ ID NO: 43406 - DNA, 22 bp, Artificial Sequence
  chemically synthesized
attctcaatcacagggagctgg

SEQ ID NO: 43407 - DNA, 22 bp, Artificial Sequence
  chemically synthesized
tcaatcacagggagctgggctt

SEQ ID NO: 43408 - DNA, 22 bp, Artificial Sequence
  chemically synthesized
aatcacagggagctgggcttcc

SEQ ID NO: 43409 - DNA, 22 bp, Artificial Sequence
  chemically synthesized
ggcttccttgagaaagccagcc

SEQ ID NO: 43410 - DNA, 22 bp, Artificial Sequence
  chemically synthesized
ccttgagaaagccagccccaaa

SEQ ID NO: 43411 - DNA, 22 bp, Artificial Sequence
  chemically synthesized
cttgagaaagccagccccaaag

SEQ ID NO: 43412 - DNA, 22 bp, Artificial Sequence
  chemically synthesized
gagaaagccagccccaaaggta

SEQ ID NO: 43413 - DNA, 22 bp, Artificial Sequence
  chemically synthesized
agaaagccagccccaaaggtac

SEQ ID NO: 43414 - DNA, 22 bp, Artificial Sequence
  chemically synthesized
tgtttaaaaagatgaaagaaat

SEQ ID NO: 43415 - DNA, 22 bp, Artificial Sequence
  chemically synthesized
aaaaagatgaaagaaatggtaa

SEQ ID NO: 43416 - DNA, 22 bp, Artificial Sequence
  chemically synthesized
aaaagatgaaagaaatggtaac

SEQ ID NO: 43417 - DNA, 22 bp, Artificial Sequence
  chemically synthesized
cgtccacaacatgttcacaagg

SEQ ID NO: 43418 - DNA, 22 bp, Artificial Sequence
  chemically synthesized
acaaggaaactccagaagaaca

SEQ ID NO: 43419 - DNA, 22 bp, Artificial Sequence
  chemically synthesized
cagaagaacagagcagtggtga

SEQ ID NO: 43420 - DNA, 22 bp, Artificial Sequence
  chemically synthesized
ctgtctgtccgtgaggctgtag

SEQ ID NO: 43421 - DNA, 22 bp, Artificial Sequence
  chemically synthesized
tctgtccgtgaggctgtagaac

SEQ ID NO: 43422 - DNA, 22 bp, Artificial Sequence
  chemically synthesized
tccgtgaggctgtagaacacaa

SEQ ID NO: 43423 - DNA, 22 bp, Artificial Sequence
  chemically synthesized
tagaacacaaggcagctcccaa

SEQ ID NO: 43424 - DNA, 22 bp, Artificial Sequence
  chemically synthesized
ccaatgctgccagactctctga

SEQ ID NO: 43425 - DNA, 22 bp, Artificial Sequence
  chemically synthesized
ccagactctctgaaccctggag

SEQ ID NO: 43426 - DNA, 22 bp, Artificial Sequence
  chemically synthesized
tctgaaccctggagagtgtaaa

SEQ ID NO: 43427 - DNA, 22 bp, Artificial Sequence
  chemically synthesized
tgaaccctggagagtgtaaacg

SEQ ID NO: 43428 - DNA, 22 bp, Artificial Sequence
  chemically synthesized
aaccctggagagtgtaaacgtc

SEQ ID NO: 43429 - DNA, 22 bp, Artificial Sequence
  chemically synthesized
gagagtgtaaacgtcatataag

SEQ ID NO: 43430 - DNA, 22 bp, Artificial Sequence
  chemically synthesized
tgttccaaaaacctggatttaa

SEQ ID NO: 43431 - DNA, 22 bp, Artificial Sequence
  chemically synthesized
caaaaacctggatttaacaatc

SEQ ID NO: 43432 - DNA, 22 bp, Artificial Sequence
  chemically synthesized
gatttaacaatctgagctttgt

SEQ ID NO: 43433 - DNA, 22 bp, Artificial Sequence
  chemically synthesized
aacaatctgagctttgtcatgg

SEQ ID NO: 43434 - DNA, 22 bp, Artificial Sequence
  chemically synthesized
acaatctgagctttgtcatggt

SEQ ID NO: 43435 - DNA, 22 bp, Artificial Sequence
  chemically synthesized
agctttgtcatggtgctttgcg

SEQ ID NO: 43436 - DNA, 22 bp, Artificial Sequence
  chemically synthesized
tgtcatggtgctttgcggttgg

SEQ ID NO: 43437 - DNA, 22 bp, Artificial Sequence
  chemically synthesized
gtcatggtgctttgcggttggt

SEQ ID NO: 43438 - DNA, 22 bp, Artificial Sequence
  chemically synthesized
tcatggtgctttgcggttggtt

SEQ ID NO: 43439 - DNA, 22 bp, Artificial Sequence
  chemically synthesized
tgcggttggttgttgtttcttt

SEQ ID NO: 43440 - DNA, 22 bp, Artificial Sequence
  chemically synthesized
gcggttggttgttgtttcttta

SEQ ID NO: 43441 - DNA, 22 bp, Artificial Sequence
  chemically synthesized
cggttggttgttgtttctttac

SEQ ID NO: 43442 - DNA, 22 bp, Artificial Sequence
  chemically synthesized
gttgttgtttctttaccttttt

SEQ ID NO: 43443 - DNA, 22 bp, Artificial Sequence
  chemically synthesized
ttgtttctttacctttttcttt

SEQ ID NO: 43444 - DNA, 22 bp, Artificial Sequence
  chemically synthesized
tttctttacctttttctttgct

SEQ ID NO: 43445 - DNA, 22 bp, Artificial Sequence
  chemically synthesized
ctttacctttttctttgctttt

SEQ ID NO: 43446 - DNA, 22 bp, Artificial Sequence
  chemically synthesized
tttacctttttctttgctttta

SEQ ID NO: 43447 - DNA, 22 bp, Artificial Sequence
  chemically synthesized
tacctttttctttgcttttaaa

SEQ ID NO: 43448 - DNA, 22 bp, Artificial Sequence
  chemically synthesized
acctttttctttgcttttaaaa

SEQ ID NO: 43449 - DNA, 22 bp, Artificial Sequence
  chemically synthesized
cctttttctttgcttttaaaac

SEQ ID NO: 43450 - DNA, 22 bp, Artificial Sequence
  chemically synthesized
tttctttgcttttaaaaccata

SEQ ID NO: 43451 - DNA, 22 bp, Artificial Sequence
  chemically synthesized
ttctttgcttttaaaaccataa

SEQ ID NO: 43452 - DNA, 22 bp, Artificial Sequence
  chemically synthesized
tctttgcttttaaaaccataaa

SEQ ID NO: 43453 - DNA, 22 bp, Artificial Sequence
  chemically synthesized
ctttgcttttaaaaccataaag

SEQ ID NO: 43454 - DNA, 22 bp, Artificial Sequence
  chemically synthesized
tttgcttttaaaaccataaaga

SEQ ID NO: 43455 - DNA, 22 bp, Artificial Sequence
  chemically synthesized
tgcttttaaaaccataaagaat

SEQ ID NO: 43456 - DNA, 22 bp, Artificial Sequence
  chemically synthesized
gcttttaaaaccataaagaata

SEQ ID NO: 43457 - DNA, 22 bp, Artificial Sequence
  chemically synthesized
cttttaaaaccataaagaataa

SEQ ID NO: 43458 - DNA, 22 bp, Artificial Sequence
  chemically synthesized
ttaaaaccataaagaataatgt

SEQ ID NO: 43459 - DNA, 22 bp, Artificial Sequence
  chemically synthesized
taaaaccataaagaataatgtt

SEQ ID NO: 43460 - DNA, 22 bp, Artificial Sequence
  chemically synthesized
aaaaccataaagaataatgttt

SEQ ID NO: 43461 - DNA, 22 bp, Artificial Sequence
  chemically synthesized
aaaccataaagaataatgttta

SEQ ID NO: 43462 - DNA, 22 bp, Artificial Sequence
  chemically synthesized
aaatgtagagtctgagaaatgc

SEQ ID NO: 43463 - DNA, 22 bp, Artificial Sequence
  chemically synthesized
aatgtagagtctgagaaatgca

SEQ ID NO: 43464 - DNA, 22 bp, Artificial Sequence
  chemically synthesized
agaaatgcaattgctattgttt

SEQ ID NO: 43465 - DNA, 22 bp, Artificial Sequence
  chemically synthesized
ctattgtttttatattttcaga

SEQ ID NO: 43466 - DNA, 22 bp, Artificial Sequence
  chemically synthesized
ttgtttttatattttcagactt

SEQ ID NO: 43467 - DNA, 22 bp, Artificial Sequence
  chemically synthesized
tttttatattttcagacttttt

SEQ ID NO: 43468 - DNA, 22 bp, Artificial Sequence
  chemically synthesized
ttatattttcagactttttgta

SEQ ID NO: 43469 - DNA, 22 bp, Artificial Sequence
  chemically synthesized
tatattttcagactttttgtat

SEQ ID NO: 43470 - DNA, 22 bp, Artificial Sequence
  chemically synthesized
atattttcagactttttgtatg

SEQ ID NO: 43471 - DNA, 22 bp, Artificial Sequence
  chemically synthesized
tattttcagactttttgtatgc

SEQ ID NO: 43472 - DNA, 22 bp, Artificial Sequence
  chemically synthesized
tcagactttttgtatgcttctt

SEQ ID NO: 43473 - DNA, 22 bp, Artificial Sequence
  chemically synthesized
cagactttttgtatgcttcttt

SEQ ID NO: 43474 - DNA, 22 bp, Artificial Sequence
  chemically synthesized
agactttttgtatgcttctttc

SEQ ID NO: 43475 - DNA, 22 bp, Artificial Sequence
  chemically synthesized
tttgtatgcttctttcactaat

SEQ ID NO: 43476 - DNA, 22 bp, Artificial Sequence
  chemically synthesized
ttgtatgcttctttcactaatt

SEQ ID NO: 43477 - DNA, 22 bp, Artificial Sequence
  chemically synthesized
tgtatgcttctttcactaatta

SEQ ID NO: 43478 - DNA, 22 bp, Artificial Sequence
  chemically synthesized
gtatgcttctttcactaattac

SEQ ID NO: 43479 - DNA, 22 bp, Artificial Sequence
  chemically synthesized
tatgcttctttcactaattaca

SEQ ID NO: 43480 - DNA, 22 bp, Artificial Sequence
  chemically synthesized
ctttcactaattacatcatatc

SEQ ID NO: 43481 - DNA, 22 bp, Artificial Sequence
  chemically synthesized
tttcactaattacatcatatca

SEQ ID NO: 43482 - DNA, 22 bp, Artificial Sequence
  chemically synthesized
tcactaattacatcatatcaca

SEQ ID NO: 43483 - DNA, 22 bp, Artificial Sequence
  chemically synthesized
cactaattacatcatatcacaa

SEQ ID NO: 43484 - DNA, 22 bp, Artificial Sequence
  chemically synthesized
actaattacatcatatcacaaa

SEQ ID NO: 43485 - DNA, 22 bp, Artificial Sequence
  chemically synthesized
attacatcatatcacaaaattt

SEQ ID NO: 43486 - DNA, 22 bp, Artificial Sequence
  chemically synthesized
catcatatcacaaaatttcaca

SEQ ID NO: 43487 - DNA, 22 bp, Artificial Sequence
  chemically synthesized
cacaccctgattttttcactca

SEQ ID NO: 43488 - DNA, 22 bp, Artificial Sequence
  chemically synthesized
acaccctgattttttcactcaa

SEQ ID NO: 43489 - DNA, 22 bp, Artificial Sequence
  chemically synthesized
attttttcactcaacattacat

SEQ ID NO: 43490 - DNA, 22 bp, Artificial Sequence
  chemically synthesized
tttcactcaacattacataatg

SEQ ID NO: 43491 - DNA, 22 bp, Artificial Sequence
  chemically synthesized
ttcactcaacattacataatga

SEQ ID NO: 43492 - DNA, 22 bp, Artificial Sequence
  chemically synthesized
tcactcaacattacataatgag

SEQ ID NO: 43493 - DNA, 22 bp, Artificial Sequence
  chemically synthesized
cactcaacattacataatgagt

SEQ ID NO: 43494 - DNA, 22 bp, Artificial Sequence
  chemically synthesized
actcaacattacataatgagtt

SEQ ID NO: 43495 - DNA, 22 bp, Artificial Sequence
  chemically synthesized
aacattacataatgagttttgt

SEQ ID NO: 43496 - DNA, 22 bp, Artificial Sequence
  chemically synthesized
cataatgagttttgtatagtgc

SEQ ID NO: 43497 - DNA, 22 bp, Artificial Sequence
  chemically synthesized
tgtatagtgctatgatcttcat

SEQ ID NO: 43498 - DNA, 22 bp, Artificial Sequence
  chemically synthesized
gtatagtgctatgatcttcata

SEQ ID NO: 43499 - DNA, 22 bp, Artificial Sequence
  chemically synthesized
tatagtgctatgatcttcataa

SEQ ID NO: 43500 - DNA, 22 bp, Artificial Sequence
  chemically synthesized
tgatcttcataactaatatttt

SEQ ID NO: 43501 - DNA, 22 bp, Artificial Sequence
  chemically synthesized
cataactaatattttaaaggag

SEQ ID NO: 43502 - DNA, 22 bp, Artificial Sequence
  chemically synthesized
ataactaatattttaaaggaga

SEQ ID NO: 43503 - DNA, 22 bp, Artificial Sequence
  chemically synthesized
atattttaaaggagagctactg

SEQ ID NO: 43504 - DNA, 22 bp, Artificial Sequence
  chemically synthesized
taaaggagagctactgattaat

SEQ ID NO: 43505 - DNA, 22 bp, Artificial Sequence
  chemically synthesized
aaaggagagctactgattaatg

SEQ ID NO: 43506 - DNA, 22 bp, Artificial Sequence
  chemically synthesized
aaggagagctactgattaatga

SEQ ID NO: 43507 - DNA, 22 bp, Artificial Sequence
  chemically synthesized
ctgattaatgagcatgaggttt

SEQ ID NO: 43508 - DNA, 22 bp, Artificial Sequence
  chemically synthesized
attaatgagcatgaggtttcct

SEQ ID NO: 43509 - DNA, 22 bp, Artificial Sequence
  chemically synthesized
atgagcatgaggtttcctttgg

SEQ ID NO: 43510 - DNA, 22 bp, Artificial Sequence
  chemically synthesized
cctttggggatgaggaaaatat

SEQ ID NO: 43511 - DNA, 22 bp, Artificial Sequence
  chemically synthesized
ctttggggatgaggaaaatatt

SEQ ID NO: 43512 - DNA, 22 bp, Artificial Sequence
  chemically synthesized
tggggatgaggaaaatattctg

SEQ ID NO: 43513 - DNA, 22 bp, Artificial Sequence
  chemically synthesized
ggggatgaggaaaatattctgg

SEQ ID NO: 43514 - DNA, 22 bp, Artificial Sequence
  chemically synthesized
gggatgaggaaaatattctgga

SEQ ID NO: 43515 - DNA, 22 bp, Artificial Sequence
  chemically synthesized
tggaaatatgatgatggttgca

SEQ ID NO: 43516 - DNA, 22 bp, Artificial Sequence
  chemically synthesized
gaaatatgatgatggttgcaca

SEQ ID NO: 43517 - DNA, 22 bp, Artificial Sequence
  chemically synthesized
cacaccactgtgaatgtactaa

SEQ ID NO: 43518 - DNA, 22 bp, Artificial Sequence
  chemically synthesized
tgaatgtactaaatgccacttg

SEQ ID NO: 43519 - DNA, 22 bp, Artificial Sequence
  chemically synthesized
aatgccacttggtggtaccctg

SEQ ID NO: 43520 - DNA, 22 bp, Artificial Sequence
  chemically synthesized
ggtggtaccctgcaaaaatggt

SEQ ID NO: 43521 - DNA, 22 bp, Artificial Sequence
  chemically synthesized
gtggtaccctgcaaaaatggtt

SEQ ID NO: 43522 - DNA, 22 bp, Artificial Sequence
  chemically synthesized
caaaaatggttaaaatagtaac

SEQ ID NO: 43523 - DNA, 22 bp, Artificial Sequence
  chemically synthesized
aaatagtaactcttacgctgtg

SEQ ID NO: 43524 - DNA, 22 bp, Artificial Sequence
  chemically synthesized
ttacgctgtgtacattttattg

SEQ ID NO: 43525 - DNA, 22 bp, Artificial Sequence
  chemically synthesized
acgctgtgtacattttattgca

SEQ ID NO: 43526 - DNA, 22 bp, Artificial Sequence
  chemically synthesized
cgctgtgtacattttattgcaa

SEQ ID NO: 43527 - DNA, 22 bp, Artificial Sequence
  chemically synthesized
tgtacattttattgcaataaaa

SEQ ID NO: 43528 - DNA, 22 bp, Artificial Sequence
  chemically synthesized
tattgcaataaaaaagaatagt

SEQ ID NO: 43529 - DNA, 22 bp, Artificial Sequence
  chemically synthesized
attgcaataaaaaagaatagtc

SEQ ID NO: 43530 - DNA, 22 bp, Artificial Sequence
  chemically synthesized
ttgcaataaaaaagaatagtca

SEQ ID NO: 43531 - DNA, 22 bp, Artificial Sequence
  chemically synthesized
caataaaaaagaatagtcatca

SEQ ID NO: 43532 - DNA, 22 bp, Artificial Sequence
  chemically synthesized
actaagcattatcctttccagg

SEQ ID NO: 43533 - DNA, 22 bp, Artificial Sequence
  chemically synthesized
ctaagcattatcctttccaggc

SEQ ID NO: 43534 - DNA, 22 bp, Artificial Sequence
  chemically synthesized
agcattatcctttccaggcaca

SEQ ID NO: 43535 - DNA, 22 bp, Artificial Sequence
  chemically synthesized
tcctttccaggcacaagcttat

SEQ ID NO: 43536 - DNA, 22 bp, Artificial Sequence
  chemically synthesized
tccaggcacaagcttataatgt

SEQ ID NO: 43537 - DNA, 22 bp, Artificial Sequence
  chemically synthesized
ccaggcacaagcttataatgtg

SEQ ID NO: 43538 - DNA, 22 bp, Artificial Sequence
  chemically synthesized
caggcacaagcttataatgtgg

SEQ ID NO: 43539 - DNA, 22 bp, Artificial Sequence
  chemically synthesized
ataatgtggtgtatctcacttc

SEQ ID NO: 43540 - DNA, 22 bp, Artificial Sequence
  chemically synthesized
taatgtggtgtatctcacttca

SEQ ID NO: 43541 - DNA, 22 bp, Artificial Sequence
  chemically synthesized
acttcatcctcacaacagtcct

SEQ ID NO: 43542 - DNA, 22 bp, Artificial Sequence
  chemically synthesized
catcctcacaacagtcctatga

SEQ ID NO: 43543 - DNA, 22 bp, Artificial Sequence
  chemically synthesized
atcctcacaacagtcctatgaa

SEQ ID NO: 43544 - DNA, 22 bp, Artificial Sequence
  chemically synthesized
acaacagtcctatgaaacaggc

SEQ ID NO: 43545 - DNA, 22 bp, Artificial Sequence
  chemically synthesized
tgaaacaggcagttccatcact

SEQ ID NO: 43546 - DNA, 22 bp, Artificial Sequence
  chemically synthesized
catcactcctgctctacagtta

SEQ ID NO: 43547 - DNA, 22 bp, Artificial Sequence
  chemically synthesized
ctgctctacagttaaggaaact

SEQ ID NO: 43548 - DNA, 22 bp, Artificial Sequence
  chemically synthesized
ctctacagttaaggaaactgag

SEQ ID NO: 43549 - DNA, 22 bp, Artificial Sequence
  chemically synthesized
tacagttaaggaaactgaggtg

SEQ ID NO: 43550 - DNA, 22 bp, Artificial Sequence
  chemically synthesized
cagttaaggaaactgaggtgta

SEQ ID NO: 43551 - DNA, 22 bp, Artificial Sequence
  chemically synthesized
aggaaactgaggtgtaaggagg

SEQ ID NO: 43552 - DNA, 22 bp, Artificial Sequence
  chemically synthesized
aggtgtaaggaggttgtctagt

SEQ ID NO: 43553 - DNA, 22 bp, Artificial Sequence
  chemically synthesized
tctagttcaacctgagcctggg

SEQ ID NO: 43554 - DNA, 22 bp, Artificial Sequence
  chemically synthesized
gttcaacctgagcctgggtctg

SEQ ID NO: 43555 - DNA, 22 bp, Artificial Sequence
  chemically synthesized
aacctgagcctgggtctgcgga

SEQ ID NO: 43556 - DNA, 22 bp, Artificial Sequence
  chemically synthesized
agcctgggtctgcggagtcact

SEQ ID NO: 43557 - DNA, 22 bp, Artificial Sequence
  chemically synthesized
ggtctgcggagtcactgcccaa

SEQ ID NO: 43558 - DNA, 22 bp, Artificial Sequence
  chemically synthesized
cggagtcactgcccaaatgctt

SEQ ID NO: 43559 - DNA, 22 bp, Artificial Sequence
  chemically synthesized
cccaaatgcttcctccccgtgc

SEQ ID NO: 43560 - DNA, 22 bp, Artificial Sequence
  chemically synthesized
cctccccgtgcgcgttggcccc

SEQ ID NO: 43561 - DNA, 22 bp, Artificial Sequence
  chemically synthesized
ctccccgtgcgcgttggccccc

SEQ ID NO: 43562 - DNA, 22 bp, Artificial Sequence
  chemically synthesized
cccgtgcgcgttggcccccctc

SEQ ID NO: 43563 - DNA, 22 bp, Artificial Sequence
  chemically synthesized
gcccccctcttgcttccaaccc

SEQ ID NO: 43564 - DNA, 22 bp, Artificial Sequence
  chemically synthesized
ttgcttccaaccctccacatct

SEQ ID NO: 43565 - DNA, 22 bp, Artificial Sequence
  chemically synthesized
gcttccaaccctccacatcttt

SEQ ID NO: 43566 - DNA, 22 bp, Artificial Sequence
  chemically synthesized
cttccaaccctccacatctttg

SEQ ID NO: 43567 - DNA, 22 bp, Artificial Sequence
  chemically synthesized
ccaaccctccacatctttgttc

SEQ ID NO: 43568 - DNA, 22 bp, Artificial Sequence
  chemically synthesized
caaccctccacatctttgttca

SEQ ID NO: 43569 - DNA, 22 bp, Artificial Sequence
  chemically synthesized
cacatctttgttcataaagttc

SEQ ID NO: 43570 - DNA, 22 bp, Artificial Sequence
  chemically synthesized
tgttcataaagttcattcttat

SEQ ID NO: 43571 - DNA, 22 bp, Artificial Sequence
  chemically synthesized
gttcataaagttcattcttatt

SEQ ID NO: 43572 - DNA, 22 bp, Artificial Sequence
  chemically synthesized
ttcataaagttcattcttattc

SEQ ID NO: 43573 - DNA, 22 bp, Artificial Sequence
  chemically synthesized
ataaagttcattcttattcctt

SEQ ID NO: 43574 - DNA, 22 bp, Artificial Sequence
  chemically synthesized
attcttattccttaatattttc

SEQ ID NO: 43575 - DNA, 22 bp, Artificial Sequence
  chemically synthesized
ttattccttaatattttctgag

SEQ ID NO: 43576 - DNA, 22 bp, Artificial Sequence
  chemically synthesized
attccttaatattttctgagcc

SEQ ID NO: 43577 - DNA, 22 bp, Artificial Sequence
  chemically synthesized
ttccttaatattttctgagcct

SEQ ID NO: 43578 - DNA, 22 bp, Artificial Sequence
  chemically synthesized
cttaatattttctgagcctaag

SEQ ID NO: 43579 - DNA, 22 bp, Artificial Sequence
  chemically synthesized
aatattttctgagcctaagttc

SEQ ID NO: 43580 - DNA, 22 bp, Artificial Sequence
  chemically synthesized
atattttctgagcctaagttcc

SEQ ID NO: 43581 - DNA, 22 bp, Artificial Sequence
  chemically synthesized
tctgagcctaagttcccataaa

SEQ ID NO: 43582 - DNA, 22 bp, Artificial Sequence
  chemically synthesized
ctgagcctaagttcccataaat

SEQ ID NO: 43583 - DNA, 22 bp, Artificial Sequence
  chemically synthesized
tgagcctaagttcccataaatt

SEQ ID NO: 43584 - DNA, 22 bp, Artificial Sequence
  chemically synthesized
agcctaagttcccataaattat

SEQ ID NO: 43585 - DNA, 22 bp, Artificial Sequence
  chemically synthesized
agttcccataaattatatagac

SEQ ID NO: 43586 - DNA, 22 bp, Artificial Sequence
  chemically synthesized
ccataaattatatagacatatt

SEQ ID NO: 43587 - DNA, 22 bp, Artificial Sequence
  chemically synthesized
tatagacatatttctgtctccc

SEQ ID NO: 43588 - DNA, 22 bp, Artificial Sequence
  chemically synthesized
ctgtctcccaataacactgcca

SEQ ID NO: 43589 - DNA, 22 bp, Artificial Sequence
  chemically synthesized
tgtctcccaataacactgccaa

SEQ ID NO: 43590 - DNA, 22 bp, Artificial Sequence
  chemically synthesized
tctcccaataacactgccaatt

SEQ ID NO: 43591 - DNA, 22 bp, Artificial Sequence
  chemically synthesized
ccaataacactgccaatttatt

SEQ ID NO: 43592 - DNA, 22 bp, Artificial Sequence
  chemically synthesized
ccaatttattttctagaaggtt

SEQ ID NO: 43593 - DNA, 22 bp, Artificial Sequence
  chemically synthesized
attttctagaaggttatgacag

SEQ ID NO: 43594 - DNA, 22 bp, Artificial Sequence
  chemically synthesized
ttttctagaaggttatgacagt

SEQ ID NO: 43595 - DNA, 22 bp, Artificial Sequence
  chemically synthesized
tctagaaggttatgacagtgta

SEQ ID NO: 43596 - DNA, 22 bp, Artificial Sequence
  chemically synthesized
ctagaaggttatgacagtgtaa

SEQ ID NO: 43597 - DNA, 22 bp, Artificial Sequence
  chemically synthesized
tagaaggttatgacagtgtaaa

SEQ ID NO: 43598 - DNA, 22 bp, Artificial Sequence
  chemically synthesized
gaaggttatgacagtgtaaaat

SEQ ID NO: 43599 - DNA, 22 bp, Artificial Sequence
  chemically synthesized
tgacagtgtaaaatgtcactag

SEQ ID NO: 43600 - DNA, 22 bp, Artificial Sequence
  chemically synthesized
gaaaacaatcacttcaccacac

SEQ ID NO: 43601 - DNA, 22 bp, Artificial Sequence
  chemically synthesized
caccacacttgtatgagtgttc

SEQ ID NO: 43602 - DNA, 22 bp, Artificial Sequence
  chemically synthesized
accacacttgtatgagtgttca

SEQ ID NO: 43603 - DNA, 22 bp, Artificial Sequence
  chemically synthesized
gtatgagtgttcaatttttaaa

SEQ ID NO: 43604 - DNA, 22 bp, Artificial Sequence
  chemically synthesized
tatgagtgttcaatttttaaat

SEQ ID NO: 43605 - DNA, 22 bp, Artificial Sequence
  chemically synthesized
aatttttaaatattagctaatc

SEQ ID NO: 43606 - DNA, 22 bp, Artificial Sequence
  chemically synthesized
ttaaatattagctaatctaaca

SEQ ID NO: 43607 - DNA, 22 bp, Artificial Sequence
  chemically synthesized
taaatattagctaatctaacag

SEQ ID NO: 43608 - DNA, 22 bp, Artificial Sequence
  chemically synthesized
aaatattagctaatctaacagg

SEQ ID NO: 43609 - DNA, 22 bp, Artificial Sequence
  chemically synthesized
aatattagctaatctaacaggt

SEQ ID NO: 43610 - DNA, 22 bp, Artificial Sequence
  chemically synthesized
gctaatctaacaggttgaaatt

SEQ ID NO: 43611 - DNA, 22 bp, Artificial Sequence
  chemically synthesized
atctaacaggttgaaattgtcc

SEQ ID NO: 43612 - DNA, 22 bp, Artificial Sequence
  chemically synthesized
acaggttgaaattgtcctgatt

SEQ ID NO: 43613 - DNA, 22 bp, Artificial Sequence
  chemically synthesized
aaattgtcctgattcattttct

SEQ ID NO: 43614 - DNA, 22 bp, Artificial Sequence
  chemically synthesized
tcctgattcattttctaattta

SEQ ID NO: 43615 - DNA, 22 bp, Artificial Sequence
  chemically synthesized
attcattttctaatttatactt

SEQ ID NO: 43616 - DNA, 22 bp, Artificial Sequence
  chemically synthesized
attttctaatttatacttcttt

SEQ ID NO: 43617 - DNA, 22 bp, Artificial Sequence
  chemically synthesized
tctaatttatacttctttgaca

SEQ ID NO: 43618 - DNA, 22 bp, Artificial Sequence
  chemically synthesized
ctaatttatacttctttgacaa

SEQ ID NO: 43619 - DNA, 22 bp, Artificial Sequence
  chemically synthesized
taatttatacttctttgacaat

SEQ ID NO: 43620 - DNA, 22 bp, Artificial Sequence
  chemically synthesized
atttatacttctttgacaattt

SEQ ID NO: 43621 - DNA, 22 bp, Artificial Sequence
  chemically synthesized
atacttctttgacaatttggga

SEQ ID NO: 43622 - DNA, 22 bp, Artificial Sequence
  chemically synthesized
tacttctttgacaatttgggag

SEQ ID NO: 43623 - DNA, 22 bp, Artificial Sequence
  chemically synthesized
ctttgacaatttgggagagtga

SEQ ID NO: 43624 - DNA, 22 bp, Artificial Sequence
  chemically synthesized
tttgacaatttgggagagtgaa

SEQ ID NO: 43625 - DNA, 22 bp, Artificial Sequence
  chemically synthesized
tgacaatttgggagagtgaaga

SEQ ID NO: 43626 - DNA, 22 bp, Artificial Sequence
  chemically synthesized
gacaatttgggagagtgaagat

SEQ ID NO: 43627 - DNA, 22 bp, Artificial Sequence
  chemically synthesized
acaatttgggagagtgaagatt

SEQ ID NO: 43628 - DNA, 22 bp, Artificial Sequence
  chemically synthesized
gggagagtgaagattctcctgg

SEQ ID NO: 43629 - DNA, 22 bp, Artificial Sequence
  chemically synthesized
ggagagtgaagattctcctggt

SEQ ID NO: 43630 - DNA, 22 bp, Artificial Sequence
  chemically synthesized
tcctggttgtgtttattctttt

SEQ ID NO: 43631 - DNA, 22 bp, Artificial Sequence
  chemically synthesized
ctggttgtgtttattcttttgt

SEQ ID NO: 43632 - DNA, 22 bp, Artificial Sequence
  chemically synthesized
gttgtgtttattcttttgtgaa

SEQ ID NO: 43633 - DNA, 22 bp, Artificial Sequence
  chemically synthesized
tgtttattcttttgtgaaaaac

SEQ ID NO: 43634 - DNA, 22 bp, Artificial Sequence
  chemically synthesized
attcttttgtgaaaaactgctt

SEQ ID NO: 43635 - DNA, 22 bp, Artificial Sequence
  chemically synthesized
ttcttttgtgaaaaactgcttt

SEQ ID NO: 43636 - DNA, 22 bp, Artificial Sequence
  chemically synthesized
ttttgtgaaaaactgctttatt

SEQ ID NO: 43637 - DNA, 22 bp, Artificial Sequence
  chemically synthesized
ttgtgaaaaactgctttatttt

SEQ ID NO: 43638 - DNA, 22 bp, Artificial Sequence
  chemically synthesized
tgtgaaaaactgctttattttc

SEQ ID NO: 43639 - DNA, 22 bp, Artificial Sequence
  chemically synthesized
gtgaaaaactgctttattttct

SEQ ID NO: 43640 - DNA, 22 bp, Artificial Sequence
  chemically synthesized
tgaaaaactgctttattttctt

SEQ ID NO: 43641 - DNA, 22 bp, Artificial Sequence
  chemically synthesized
ctttattttctttgccaaattc

SEQ ID NO: 43642 - DNA, 22 bp, Artificial Sequence
  chemically synthesized
tattttctttgccaaattcaaa

SEQ ID NO: 43643 - DNA, 22 bp, Artificial Sequence
  chemically synthesized
attttctttgccaaattcaaat

SEQ ID NO: 43644 - DNA, 22 bp, Artificial Sequence
  chemically synthesized
ttttctttgccaaattcaaata

SEQ ID NO: 43645 - DNA, 22 bp, Artificial Sequence
  chemically synthesized
tctttgccaaattcaaatagaa

SEQ ID NO: 43646 - DNA, 22 bp, Artificial Sequence
  chemically synthesized
ctttgccaaattcaaatagaac

SEQ ID NO: 43647 - DNA, 22 bp, Artificial Sequence
  chemically synthesized
tttgccaaattcaaatagaacg

SEQ ID NO: 43648 - DNA, 22 bp, Artificial Sequence
  chemically synthesized
tgccaaattcaaatagaacggt

SEQ ID NO: 43649 - DNA, 22 bp, Artificial Sequence
  chemically synthesized
gccaaattcaaatagaacggtt

SEQ ID NO: 43650 - DNA, 22 bp, Artificial Sequence
  chemically synthesized
ccaaattcaaatagaacggttg

SEQ ID NO: 43651 - DNA, 22 bp, Artificial Sequence
  chemically synthesized
aaatagaacggttgcaaaattg

SEQ ID NO: 43652 - DNA, 22 bp, Artificial Sequence
  chemically synthesized
caaaattgccagaggaaatgct

SEQ ID NO: 43653 - DNA, 22 bp, Artificial Sequence
  chemically synthesized
ccagaggaaatgctgtttttcc

SEQ ID NO: 43654 - DNA, 22 bp, Artificial Sequence
  chemically synthesized
tttttccagatggacacaccca

SEQ ID NO: 43655 - DNA, 22 bp, Artificial Sequence
  chemically synthesized
ttccagatggacacacccaggg

SEQ ID NO: 43656 - DNA, 22 bp, Artificial Sequence
  chemically synthesized
tccagatggacacacccaggga

SEQ ID NO: 43657 - DNA, 22 bp, Artificial Sequence
  chemically synthesized
ccagatggacacacccagggat

SEQ ID NO: 43658 - DNA, 22 bp, Artificial Sequence
  chemically synthesized
cagatggacacacccagggatg

SEQ ID NO: 43659 - DNA, 22 bp, Artificial Sequence
  chemically synthesized
cagtgttctcacaaataatcca

SEQ ID NO: 43660 - DNA, 22 bp, Artificial Sequence
  chemically synthesized
agtgttctcacaaataatccag

SEQ ID NO: 43661 - DNA, 22 bp, Artificial Sequence
  chemically synthesized
tcacaaataatccagttttcta

SEQ ID NO: 43662 - DNA, 22 bp, Artificial Sequence
  chemically synthesized
acaaataatccagttttctaat

SEQ ID NO: 43663 - DNA, 22 bp, Artificial Sequence
  chemically synthesized
tctaattttgcaagcccagctt

SEQ ID NO: 43664 - DNA, 22 bp, Artificial Sequence
  chemically synthesized
ctaattttgcaagcccagcttt

SEQ ID NO: 43665 - DNA, 22 bp, Artificial Sequence
  chemically synthesized
taattttgcaagcccagctttc

SEQ ID NO: 43666 - DNA, 22 bp, Artificial Sequence
  chemically synthesized
attttgcaagcccagctttcat

SEQ ID NO: 43667 - DNA, 22 bp, Artificial Sequence
  chemically synthesized
tgcaagcccagctttcattaga

SEQ ID NO: 43668 - DNA, 22 bp, Artificial Sequence
  chemically synthesized
gcaagcccagctttcattagaa

SEQ ID NO: 43669 - DNA, 22 bp, Artificial Sequence
  chemically synthesized
caagcccagctttcattagaat

SEQ ID NO: 43670 - DNA, 22 bp, Artificial Sequence
  chemically synthesized
tcattagaattttgcaaaaatc

SEQ ID NO: 43671 - DNA, 22 bp, Artificial Sequence
  chemically synthesized
cattagaattttgcaaaaatcc

SEQ ID NO: 43672 - DNA, 22 bp, Artificial Sequence
  chemically synthesized
attagaattttgcaaaaatcct

SEQ ID NO: 43673 - DNA, 22 bp, Artificial Sequence
  chemically synthesized
gaattttgcaaaaatccttgct

SEQ ID NO: 43674 - DNA, 22 bp, Artificial Sequence
  chemically synthesized
tgcaaaaatccttgctttgcga

SEQ ID NO: 43675 - DNA, 22 bp, Artificial Sequence
  chemically synthesized
gcaaaaatccttgctttgcgag

SEQ ID NO: 43676 - DNA, 22 bp, Artificial Sequence
  chemically synthesized
caaaaatccttgctttgcgagc

SEQ ID NO: 43677 - DNA, 22 bp, Artificial Sequence
  chemically synthesized
gctttgcgagcatggcacaggc

SEQ ID NO: 43678 - DNA, 22 bp, Artificial Sequence
  chemically synthesized
ctttgcgagcatggcacaggca

SEQ ID NO: 43679 - DNA, 22 bp, Artificial Sequence
  chemically synthesized
tgcgagcatggcacaggcaaga

SEQ ID NO: 43680 - DNA, 22 bp, Artificial Sequence
  chemically synthesized
gcgagcatggcacaggcaagag

SEQ ID NO: 43681 - DNA, 22 bp, Artificial Sequence
  chemically synthesized
cgagcatggcacaggcaagaga

SEQ ID NO: 43682 - DNA, 22 bp, Artificial Sequence
  chemically synthesized
tctctttcttcccccagagcct

SEQ ID NO: 43683 - DNA, 22 bp, Artificial Sequence
  chemically synthesized
tctttcttcccccagagccttt

SEQ ID NO: 43684 - DNA, 22 bp, Artificial Sequence
  chemically synthesized
tttcttcccccagagcctttga

SEQ ID NO: 43685 - DNA, 22 bp, Artificial Sequence
  chemically synthesized
tcttcccccagagcctttgact

SEQ ID NO: 43686 - DNA, 22 bp, Artificial Sequence
  chemically synthesized
cttcccccagagcctttgactg

SEQ ID NO: 43687 - DNA, 22 bp, Artificial Sequence
  chemically synthesized
ttcccccagagcctttgactgc

SEQ ID NO: 43688 - DNA, 22 bp, Artificial Sequence
  chemically synthesized
cccccagagcctttgactgcac

SEQ ID NO: 43689 - DNA, 22 bp, Artificial Sequence
  chemically synthesized
ccccagagcctttgactgcact

SEQ ID NO: 43690 - DNA, 22 bp, Artificial Sequence
  chemically synthesized
tgactgcacttagatcattgac

SEQ ID NO: 43691 - DNA, 22 bp, Artificial Sequence
  chemically synthesized
gactgcacttagatcattgact

SEQ ID NO: 43692 - DNA, 22 bp, Artificial Sequence
  chemically synthesized
actgcacttagatcattgactt

SEQ ID NO: 43693 - DNA, 22 bp, Artificial Sequence
  chemically synthesized
cacttagatcattgactttggt

SEQ ID NO: 43694 - DNA, 22 bp, Artificial Sequence
  chemically synthesized
agatcattgactttggttcaga

SEQ ID NO: 43695 - DNA, 22 bp, Artificial Sequence
  chemically synthesized
gatcattgactttggttcagaa

SEQ ID NO: 43696 - DNA, 22 bp, Artificial Sequence
  chemically synthesized
actttggttcagaaacctgact

SEQ ID NO: 43697 - DNA, 22 bp, Artificial Sequence
  chemically synthesized
tggttcagaaacctgactgcat

SEQ ID NO: 43698 - DNA, 22 bp, Artificial Sequence
  chemically synthesized
ggttcagaaacctgactgcatc

SEQ ID NO: 43699 - DNA, 22 bp, Artificial Sequence
  chemically synthesized
gttcagaaacctgactgcatct

SEQ ID NO: 43700 - DNA, 22 bp, Artificial Sequence
  chemically synthesized
agaaacctgactgcatctggag

SEQ ID NO: 43701 - DNA, 22 bp, Artificial Sequence
  chemically synthesized
actgcatctggagttgacatga

SEQ ID NO: 43702 - DNA, 22 bp, Artificial Sequence
  chemically synthesized
catctggagttgacatgagcag

SEQ ID NO: 43703 - DNA, 22 bp, Artificial Sequence
  chemically synthesized
gagttgacatgagcagcatgga

SEQ ID NO: 43704 - DNA, 22 bp, Artificial Sequence
  chemically synthesized
acatgagcagcatggaagatgt

SEQ ID NO: 43705 - DNA, 22 bp, Artificial Sequence
  chemically synthesized
gtcccagcacctcactccagag

SEQ ID NO: 43706 - DNA, 22 bp, Artificial Sequence
  chemically synthesized
tcccagcacctcactccagagg

SEQ ID NO: 43707 - DNA, 22 bp, Artificial Sequence
  chemically synthesized
actccagaggccagctcagctc

SEQ ID NO: 43708 - DNA, 22 bp, Artificial Sequence
  chemically synthesized
cagaggccagctcagctcaatc

SEQ ID NO: 43709 - DNA, 22 bp, Artificial Sequence
  chemically synthesized
agctcaatctgggcagagctgc

SEQ ID NO: 43710 - DNA, 22 bp, Artificial Sequence
  chemically synthesized
aatctgggcagagctgcatgat

SEQ ID NO: 43711 - DNA, 22 bp, Artificial Sequence
  chemically synthesized
ggcagagctgcatgatggaagt

SEQ ID NO: 43712 - DNA, 22 bp, Artificial Sequence
  chemically synthesized
catgatggaagtttctgactac

SEQ ID NO: 43713 - DNA, 22 bp, Artificial Sequence
  chemically synthesized
ctgactaccaagcatcgggcag

SEQ ID NO: 43714 - DNA, 22 bp, Artificial Sequence
  chemically synthesized
tgactaccaagcatcgggcaga

SEQ ID NO: 43715 - DNA, 22 bp, Artificial Sequence
  chemically synthesized
actaccaagcatcgggcagagg

SEQ ID NO: 43716 - DNA, 22 bp, Artificial Sequence
  chemically synthesized
ccaagcatcgggcagagggtgc

SEQ ID NO: 43717 - DNA, 22 bp, Artificial Sequence
  chemically synthesized
gactacatagttgtgtgaggga

SEQ ID NO: 43718 - DNA, 22 bp, Artificial Sequence
  chemically synthesized
catagttgtgtgagggagcacc

SEQ ID NO: 43719 - DNA, 22 bp, Artificial Sequence
  chemically synthesized
tgtgagggagcaccgttctcta

SEQ ID NO: 43720 - DNA, 22 bp, Artificial Sequence
  chemically synthesized
tctagaatctgctatttgagca

SEQ ID NO: 43721 - DNA, 22 bp, Artificial Sequence
  chemically synthesized
tagaatctgctatttgagcaag

SEQ ID NO: 43722 - DNA, 22 bp, Artificial Sequence
  chemically synthesized
gaatctgctatttgagcaaggc

SEQ ID NO: 43723 - DNA, 22 bp, Artificial Sequence
  chemically synthesized
ctatttgagcaaggcaaacatc

SEQ ID NO: 43724 - DNA, 22 bp, Artificial Sequence
  chemically synthesized
tttgagcaaggcaaacatcctg

SEQ ID NO: 43725 - DNA, 22 bp, Artificial Sequence
  chemically synthesized
gagcaaggcaaacatcctgata

SEQ ID NO: 43726 - DNA, 22 bp, Artificial Sequence
  chemically synthesized
agcaaggcaaacatcctgataa

SEQ ID NO: 43727 - DNA, 22 bp, Artificial Sequence
  chemically synthesized
ataatggtgaaaacctaccgca

SEQ ID NO: 43728 - DNA, 22 bp, Artificial Sequence
  chemically synthesized
ccgcaagttgccaggaaagttg

SEQ ID NO: 43729 - DNA, 22 bp, Artificial Sequence
  chemically synthesized
ccaggaaagttgatgtggtctg

SEQ ID NO: 43730 - DNA, 22 bp, Artificial Sequence
  chemically synthesized
atgtggtctgcgagtaggtgct

SEQ ID NO: 43731 - DNA, 22 bp, Artificial Sequence
  chemically synthesized
cgagtaggtgctgccatccagt

SEQ ID NO: 43732 - DNA, 22 bp, Artificial Sequence
  chemically synthesized
ccatccagtggccgacatagag

SEQ ID NO: 43733 - DNA, 22 bp, Artificial Sequence
  chemically synthesized
tgagggcaggtaggccacaggt

SEQ ID NO: 43734 - DNA, 22 bp, Artificial Sequence
  chemically synthesized
agggcaggtaggccacaggtga

SEQ ID NO: 43735 - DNA, 22 bp, Artificial Sequence
  chemically synthesized
aagccctccctgatggggcctt

SEQ ID NO: 43736 - DNA, 22 bp, Artificial Sequence
  chemically synthesized
cctgatggggccttggggagag

SEQ ID NO: 43737 - DNA, 22 bp, Artificial Sequence
  chemically synthesized
atggggccttggggagagggca

SEQ ID NO: 43738 - DNA, 22 bp, Artificial Sequence
  chemically synthesized
ggggagagggcagcagggtaag

SEQ ID NO: 43739 - DNA, 22 bp, Artificial Sequence
  chemically synthesized
gggagagggcagcagggtaagt

SEQ ID NO: 43740 - DNA, 22 bp, Artificial Sequence
  chemically synthesized
attgtggatgacgactgacctg

SEQ ID NO: 43741 - DNA, 22 bp, Artificial Sequence
  chemically synthesized
tggatgacgactgacctggaaa

SEQ ID NO: 43742 - DNA, 22 bp, Artificial Sequence
  chemically synthesized
acctggaaaatccccttggcct

SEQ ID NO: 43743 - DNA, 22 bp, Artificial Sequence
  chemically synthesized
gaaaatccccttggcctcaaca

SEQ ID NO: 43744 - DNA, 22 bp, Artificial Sequence
  chemically synthesized
ggcctcaacacctccaaactct

SEQ ID NO: 43745 - DNA, 22 bp, Artificial Sequence
  chemically synthesized
gcctcaacacctccaaactctg

SEQ ID NO: 43746 - DNA, 22 bp, Artificial Sequence
  chemically synthesized
aacacctccaaactctgcattt

SEQ ID NO: 43747 - DNA, 22 bp, Artificial Sequence
  chemically synthesized
caaactctgcatttgatccaag

SEQ ID NO: 43748 - DNA, 22 bp, Artificial Sequence
  chemically synthesized
tgcatttgatccaagtcaggga

SEQ ID NO: 43749 - DNA, 22 bp, Artificial Sequence
  chemically synthesized
catttgatccaagtcagggaac

SEQ ID NO: 43750 - DNA, 22 bp, Artificial Sequence
  chemically synthesized
gatccaagtcagggaacacctg

SEQ ID NO: 43751 - DNA, 22 bp, Artificial Sequence
  chemically synthesized
atccaagtcagggaacacctgg

SEQ ID NO: 43752 - DNA, 22 bp, Artificial Sequence
  chemically synthesized
gaaacatgaaggggagagcagg

SEQ ID NO: 43753 - DNA, 22 bp, Artificial Sequence
  chemically synthesized
tgacctccctctcagaggctga

SEQ ID NO: 43754 - DNA, 22 bp, Artificial Sequence
  chemically synthesized
gacctccctctcagaggctgag

SEQ ID NO: 43755 - DNA, 22 bp, Artificial Sequence
  chemically synthesized
acctccctctcagaggctgaga

SEQ ID NO: 43756 - DNA, 22 bp, Artificial Sequence
  chemically synthesized
cctctcagaggctgagaacgcc

SEQ ID NO: 43757 - DNA, 22 bp, Artificial Sequence
  chemically synthesized
tcagaggctgagaacgccaatt

SEQ ID NO: 43758 - DNA, 22 bp, Artificial Sequence
  chemically synthesized
agaggctgagaacgccaattga

SEQ ID NO: 43759 - DNA, 22 bp, Artificial Sequence
  chemically synthesized
agaacgccaattgacctgatgt

SEQ ID NO: 43760 - DNA, 22 bp, Artificial Sequence
  chemically synthesized
acctgatgtcattattgacatg

SEQ ID NO: 43761 - DNA, 22 bp, Artificial Sequence
  chemically synthesized
atgtcattattgacatgtagaa

SEQ ID NO: 43762 - DNA, 22 bp, Artificial Sequence
  chemically synthesized
ttgacatgtagaaaattgatga

SEQ ID NO: 43763 - DNA, 22 bp, Artificial Sequence
  chemically synthesized
acatgtagaaaattgatgaaca

SEQ ID NO: 43764 - DNA, 22 bp, Artificial Sequence
  chemically synthesized
atgaacaggcctgagttatgtt

SEQ ID NO: 43765 - DNA, 22 bp, Artificial Sequence
  chemically synthesized
agttatgttttgtggcacctca

SEQ ID NO: 43766 - DNA, 22 bp, Artificial Sequence
  chemically synthesized
tgttttgtggcacctcatggtc

SEQ ID NO: 43767 - DNA, 22 bp, Artificial Sequence
  chemically synthesized
tgtggcacctcatggtctagtt

SEQ ID NO: 43768 - DNA, 22 bp, Artificial Sequence
  chemically synthesized
gtggcacctcatggtctagtta

SEQ ID NO: 43769 - DNA, 22 bp, Artificial Sequence
  chemically synthesized
tggcacctcatggtctagttag

SEQ ID NO: 43770 - DNA, 22 bp, Artificial Sequence
  chemically synthesized
atggtctagttagtgttctgag

SEQ ID NO: 43771 - DNA, 22 bp, Artificial Sequence
  chemically synthesized
gttagtgttctgagaatcattt

SEQ ID NO: 43772 - DNA, 22 bp, Artificial Sequence
  chemically synthesized
gtgttctgagaatcattttctc

SEQ ID NO: 43773 - DNA, 22 bp, Artificial Sequence
  chemically synthesized
tgagaatcattttctcagtgga

SEQ ID NO: 43774 - DNA, 22 bp, Artificial Sequence
  chemically synthesized
agaatcattttctcagtggacc

SEQ ID NO: 43775 - DNA, 22 bp, Artificial Sequence
  chemically synthesized
tctcagtggacctgcaggtgag

SEQ ID NO: 43776 - DNA, 22 bp, Artificial Sequence
  chemically synthesized
ctcagtggacctgcaggtgaga

SEQ ID NO: 43777 - DNA, 22 bp, Artificial Sequence
  chemically synthesized
tcagtggacctgcaggtgagac

SEQ ID NO: 43778 - DNA, 22 bp, Artificial Sequence
  chemically synthesized
agtggacctgcaggtgagacca

SEQ ID NO: 43779 - DNA, 22 bp, Artificial Sequence
  chemically synthesized
caggtgagaccaggcgaggcag

SEQ ID NO: 43780 - DNA, 22 bp, Artificial Sequence
  chemically synthesized
gtgggggatggtggttagaaat

SEQ ID NO: 43781 - DNA, 22 bp, Artificial Sequence
  chemically synthesized
gaaatgtgtggatggttgtggg

SEQ ID NO: 43782 - DNA, 22 bp, Artificial Sequence
  chemically synthesized
tggggcagaagaaacagcaagt

SEQ ID NO: 43783 - DNA, 22 bp, Artificial Sequence
  chemically synthesized
tgggccagctacaaactggtta

SEQ ID NO: 43784 - DNA, 22 bp, Artificial Sequence
  chemically synthesized
ggccagctacaaactggttata

SEQ ID NO: 43785 - DNA, 22 bp, Artificial Sequence
  chemically synthesized
caaactggttatatgatgtcta

SEQ ID NO: 43786 - DNA, 22 bp, Artificial Sequence
  chemically synthesized
gttatatgatgtctactgatga

SEQ ID NO: 43787 - DNA, 22 bp, Artificial Sequence
  chemically synthesized
tatgatgtctactgatgatgat

SEQ ID NO: 43788 - DNA, 22 bp, Artificial Sequence
  chemically synthesized
ctgatgatgatagtgatggtgg

SEQ ID NO: 43789 - DNA, 22 bp, Artificial Sequence
  chemically synthesized
atgatgatagtgatggtggtgg

SEQ ID NO: 43790 - DNA, 22 bp, Artificial Sequence
  chemically synthesized
tgatggtggtggaatgatgatg

SEQ ID NO: 43791 - DNA, 22 bp, Artificial Sequence
  chemically synthesized
gtgatggtggtagtggtcgtgg

SEQ ID NO: 43792 - DNA, 22 bp, Artificial Sequence
  chemically synthesized
atggtggtggtaatgataatga

SEQ ID NO: 43793 - DNA, 22 bp, Artificial Sequence
  chemically synthesized
tcatgatgatagcggtggtgat

SEQ ID NO: 43794 - DNA, 22 bp, Artificial Sequence
  chemically synthesized
agggtgatgataatagtgacag

SEQ ID NO: 43795 - DNA, 22 bp, Artificial Sequence
  chemically synthesized
agtagtaatgatggtgatggtg

SEQ ID NO: 43796 - DNA, 22 bp, Artificial Sequence
  chemically synthesized
tggtgatgatggtggtggtagt

SEQ ID NO: 43797 - DNA, 22 bp, Artificial Sequence
  chemically synthesized
agggtgatgataatagtgatag

SEQ ID NO: 43798 - DNA, 22 bp, Artificial Sequence
  chemically synthesized
tcactattatcatcaccctcaa

SEQ ID NO: 43799 - DNA, 22 bp, Artificial Sequence
  chemically synthesized
ttatcatcaccctcaacatcat

SEQ ID NO: 43800 - DNA, 22 bp, Artificial Sequence
  chemically synthesized
tcatcaccctcaacatcatcac

SEQ ID NO: 43801 - DNA, 22 bp, Artificial Sequence
  chemically synthesized
aacatcatcaccatcatcacta

SEQ ID NO: 43802 - DNA, 22 bp, Artificial Sequence
  chemically synthesized
tcatcaccaccaccatcatcgt

SEQ ID NO: 43803 - DNA, 22 bp, Artificial Sequence
  chemically synthesized
ctaccactaccaccaccatcat

SEQ ID NO: 43804 - DNA, 22 bp, Artificial Sequence
  chemically synthesized
ccactaccaccaccatcatcac

SEQ ID NO: 43805 - DNA, 22 bp, Artificial Sequence
  chemically synthesized
ccaccaccatcatcaccacagc

SEQ ID NO: 43806 - DNA, 22 bp, Artificial Sequence
  chemically synthesized
ctactcagcaccaccatcatca

SEQ ID NO: 43807 - DNA, 22 bp, Artificial Sequence
  chemically synthesized
ctcagcaccaccatcatcattc

SEQ ID NO: 43808 - DNA, 22 bp, Artificial Sequence
  chemically synthesized
agcaccaccatcatcattccac

SEQ ID NO: 43809 - DNA, 22 bp, Artificial Sequence
  chemically synthesized
caccaccatcaccatcattcca

SEQ ID NO: 43810 - DNA, 22 bp, Artificial Sequence
  chemically synthesized
caccatcaccattatcattacc

SEQ ID NO: 43811 - DNA, 22 bp, Artificial Sequence
  chemically synthesized
tcattaccaccaccactgtcac

SEQ ID NO: 43812 - DNA, 22 bp, Artificial Sequence
  chemically synthesized
ccaccaccactgtcactattat

SEQ ID NO: 43813 - DNA, 22 bp, Artificial Sequence
  chemically synthesized
tcactattatcatcaccctcaa

SEQ ID NO: 43814 - DNA, 22 bp, Artificial Sequence
  chemically synthesized
ttatcatcaccctcaacatcat

SEQ ID NO: 43815 - DNA, 22 bp, Artificial Sequence
  chemically synthesized
tcatcaccctcaacatcatcac

SEQ ID NO: 43816 - DNA, 22 bp, Artificial Sequence
  chemically synthesized
aacatcatcaccaccaccatca

SEQ ID NO: 43817 - DNA, 22 bp, Artificial Sequence
  chemically synthesized
ctaccaccaccaccaccatcac

SEQ ID NO: 43818 - DNA, 22 bp, Artificial Sequence
  chemically synthesized
ccaccaccaccaccatcaccat

SEQ ID NO: 43819 - DNA, 22 bp, Artificial Sequence
  chemically synthesized
taccaccatcaccattatcatc

SEQ ID NO: 43820 - DNA, 22 bp, Artificial Sequence
  chemically synthesized
ccaccatcaccattatcatcac

SEQ ID NO: 43821 - DNA, 22 bp, Artificial Sequence
  chemically synthesized
tcatcaccatcaccatcaccac

SEQ ID NO: 43822 - DNA, 22 bp, Artificial Sequence
  chemically synthesized
tcatcatgataatcattatcat

SEQ ID NO: 43823 - DNA, 22 bp, Artificial Sequence
  chemically synthesized
tcattaccaccaccattagcat

SEQ ID NO: 43824 - DNA, 22 bp, Artificial Sequence
  chemically synthesized
ccaccaccattagcattatcat

SEQ ID NO: 43825 - DNA, 22 bp, Artificial Sequence
  chemically synthesized
gcattatcattaccaccaccat

SEQ ID NO: 43826 - DNA, 22 bp, Artificial Sequence
  chemically synthesized
tcattaccaccaccatcactat

SEQ ID NO: 43827 - DNA, 22 bp, Artificial Sequence
  chemically synthesized
ccaccaccatcactatcactat

SEQ ID NO: 43828 - DNA, 22 bp, Artificial Sequence
  chemically synthesized
tcactatcaccatcaccacgac

SEQ ID NO: 43829 - DNA, 22 bp, Artificial Sequence
  chemically synthesized
tcaccatcaccacgaccactac

SEQ ID NO: 43830 - DNA, 22 bp, Artificial Sequence
  chemically synthesized
ccaccatcaccaacaccatcat

SEQ ID NO: 43831 - DNA, 22 bp, Artificial Sequence
  chemically synthesized
ctacccaccaccaccatcatca

SEQ ID NO: 43832 - DNA, 22 bp, Artificial Sequence
  chemically synthesized
cccaccaccaccatcatcatca

SEQ ID NO: 43833 - DNA, 22 bp, Artificial Sequence
  chemically synthesized
caccaccatcacaattattacc

SEQ ID NO: 43834 - DNA, 22 bp, Artificial Sequence
  chemically synthesized
ttaccaccaccaccatcaccac

SEQ ID NO: 43835 - DNA, 22 bp, Artificial Sequence
  chemically synthesized
ccaccaccaccatcaccaccac

SEQ ID NO: 43836 - DNA, 22 bp, Artificial Sequence
  chemically synthesized
tcatcatcagtagacatcatat

SEQ ID NO: 43837 - DNA, 22 bp, Artificial Sequence
  chemically synthesized
gtagctggcccagagcctactt

SEQ ID NO: 43838 - DNA, 22 bp, Artificial Sequence
  chemically synthesized
tagctggcccagagcctacttg

SEQ ID NO: 43839 - DNA, 22 bp, Artificial Sequence
  chemically synthesized
gcccagagcctacttgctgttt

SEQ ID NO: 43840 - DNA, 22 bp, Artificial Sequence
  chemically synthesized
cttgctgtttcttctgccccac

SEQ ID NO: 43841 - DNA, 22 bp, Artificial Sequence
  chemically synthesized
gctgtttcttctgccccacaac

SEQ ID NO: 43842 - DNA, 22 bp, Artificial Sequence
  chemically synthesized
ctgtttcttctgccccacaacc

SEQ ID NO: 43843 - DNA, 22 bp, Artificial Sequence
  chemically synthesized
tttcttctgccccacaaccatc

SEQ ID NO: 43844 - DNA, 22 bp, Artificial Sequence
  chemically synthesized
cttctgccccacaaccatccac

SEQ ID NO: 43845 - DNA, 22 bp, Artificial Sequence
  chemically synthesized
ttctgccccacaaccatccaca

SEQ ID NO: 43846 - DNA, 22 bp, Artificial Sequence
  chemically synthesized
ctgccccacaaccatccacaca

SEQ ID NO: 43847 - DNA, 22 bp, Artificial Sequence
  chemically synthesized
tgccccacaaccatccacacat

SEQ ID NO: 43848 - DNA, 22 bp, Artificial Sequence
  chemically synthesized
ccccacaaccatccacacattt

SEQ ID NO: 43849 - DNA, 22 bp, Artificial Sequence
  chemically synthesized
ctaaccaccatcccccactagg

SEQ ID NO: 43850 - DNA, 22 bp, Artificial Sequence
  chemically synthesized
taaccaccatcccccactaggc

SEQ ID NO: 43851 - DNA, 22 bp, Artificial Sequence
  chemically synthesized
accaccatcccccactaggctt

SEQ ID NO: 43852 - DNA, 22 bp, Artificial Sequence
  chemically synthesized
ggcttctgcctcgcctggtctc

SEQ ID NO: 43853 - DNA, 22 bp, Artificial Sequence
  chemically synthesized
ctgcctcgcctggtctcacctg

SEQ ID NO: 43854 - DNA, 22 bp, Artificial Sequence
  chemically synthesized
tgcctcgcctggtctcacctgc

SEQ ID NO: 43855 - DNA, 22 bp, Artificial Sequence
  chemically synthesized
cctcgcctggtctcacctgcag

SEQ ID NO: 43856 - DNA, 22 bp, Artificial Sequence
  chemically synthesized
gcctggtctcacctgcaggtcc

SEQ ID NO: 43857 - DNA, 22 bp, Artificial Sequence
  chemically synthesized
gtctcacctgcaggtccactga

SEQ ID NO: 43858 - DNA, 22 bp, Artificial Sequence
  chemically synthesized
acctgcaggtccactgagaaaa

SEQ ID NO: 43859 - DNA, 22 bp, Artificial Sequence
  chemically synthesized
caggtccactgagaaaatgatt

SEQ ID NO: 43860 - DNA, 22 bp, Artificial Sequence
  chemically synthesized
agaaaatgattctcagaacact

SEQ ID NO: 43861 - DNA, 22 bp, Artificial Sequence
  chemically synthesized
tcagaacactaactagaccatg

SEQ ID NO: 43862 - DNA, 22 bp, Artificial Sequence
  chemically synthesized
agaacactaactagaccatgag

SEQ ID NO: 43863 - DNA, 22 bp, Artificial Sequence
  chemically synthesized
actagaccatgaggtgccacaa

SEQ ID NO: 43864 - DNA, 22 bp, Artificial Sequence
  chemically synthesized
gaccatgaggtgccacaaaaca

SEQ ID NO: 43865 - DNA, 22 bp, Artificial Sequence
  chemically synthesized
aggcctgttcatcaattttcta

SEQ ID NO: 43866 - DNA, 22 bp, Artificial Sequence
  chemically synthesized
ttcatcaattttctacatgtca

SEQ ID NO: 43867 - DNA, 22 bp, Artificial Sequence
  chemically synthesized
atcaattttctacatgtcaata

SEQ ID NO: 43868 - DNA, 22 bp, Artificial Sequence
  chemically synthesized
tctacatgtcaataatgacatc

SEQ ID NO: 43869 - DNA, 22 bp, Artificial Sequence
  chemically synthesized
ctacatgtcaataatgacatca

SEQ ID NO: 43870 - DNA, 22 bp, Artificial Sequence
  chemically synthesized
tacatgtcaataatgacatcag

SEQ ID NO: 43871 - DNA, 22 bp, Artificial Sequence
  chemically synthesized
catgtcaataatgacatcaggt

SEQ ID NO: 43872 - DNA, 22 bp, Artificial Sequence
  chemically synthesized
gcgttctcagcctctgagaggg

SEQ ID NO: 43873 - DNA, 22 bp, Artificial Sequence
  chemically synthesized
tcagcctctgagagggaggtca

SEQ ID NO: 43874 - DNA, 22 bp, Artificial Sequence
  chemically synthesized
agcctctgagagggaggtcaaa

SEQ ID NO: 43875 - DNA, 22 bp, Artificial Sequence
  chemically synthesized
tgagagggaggtcaaagttttc

SEQ ID NO: 43876 - DNA, 22 bp, Artificial Sequence
  chemically synthesized
agagggaggtcaaagttttcct

SEQ ID NO: 43877 - DNA, 22 bp, Artificial Sequence
  chemically synthesized
tcctgctctccccttcatgttt

SEQ ID NO: 43878 - DNA, 22 bp, Artificial Sequence
  chemically synthesized
cctgctctccccttcatgtttc

SEQ ID NO: 43879 - DNA, 22 bp, Artificial Sequence
  chemically synthesized
ctgctctccccttcatgtttcc

SEQ ID NO: 43880 - DNA, 22 bp, Artificial Sequence
  chemically synthesized
ctctccccttcatgtttccagg

SEQ ID NO: 43881 - DNA, 22 bp, Artificial Sequence
  chemically synthesized
tccccttcatgtttccaggtgt

SEQ ID NO: 43882 - DNA, 22 bp, Artificial Sequence
  chemically synthesized
cccttcatgtttccaggtgttc

SEQ ID NO: 43883 - DNA, 22 bp, Artificial Sequence
  chemically synthesized
catgtttccaggtgttccctga

SEQ ID NO: 43884 - DNA, 22 bp, Artificial Sequence
  chemically synthesized
atgtttccaggtgttccctgac

SEQ ID NO: 43885 - DNA, 22 bp, Artificial Sequence
  chemically synthesized
ccaggtgttccctgacttggat

SEQ ID NO: 43886 - DNA, 22 bp, Artificial Sequence
  chemically synthesized
caggtgttccctgacttggatc

SEQ ID NO: 43887 - DNA, 22 bp, Artificial Sequence
  chemically synthesized
cctgacttggatcaaatgcaga

SEQ ID NO: 43888 - DNA, 22 bp, Artificial Sequence
  chemically synthesized
acttggatcaaatgcagagttt

SEQ ID NO: 43889 - DNA, 22 bp, Artificial Sequence
  chemically synthesized
ggatcaaatgcagagtttggag

SEQ ID NO: 43890 - DNA, 22 bp, Artificial Sequence
  chemically synthesized
gatcaaatgcagagtttggagg

SEQ ID NO: 43891 - DNA, 22 bp, Artificial Sequence
  chemically synthesized
ggaggtgttgaggccaagggga

SEQ ID NO: 43892 - DNA, 22 bp, Artificial Sequence
  chemically synthesized
gaggtgttgaggccaaggggat

SEQ ID NO: 43893 - DNA, 22 bp, Artificial Sequence
  chemically synthesized
aggccaaggggattttccaggt

SEQ ID NO: 43894 - DNA, 22 bp, Artificial Sequence
  chemically synthesized
tccaggtcagtcgtcatccaca

SEQ ID NO: 43895 - DNA, 22 bp, Artificial Sequence
  chemically synthesized
ccaggtcagtcgtcatccacaa

SEQ ID NO: 43896 - DNA, 22 bp, Artificial Sequence
  chemically synthesized
caggtcagtcgtcatccacaat

SEQ ID NO: 43897 - DNA, 22 bp, Artificial Sequence
  chemically synthesized
atcctgccgctggacttaccct

SEQ ID NO: 43898 - DNA, 22 bp, Artificial Sequence
  chemically synthesized
ccgctggacttaccctgctgcc

SEQ ID NO: 43899 - DNA, 22 bp, Artificial Sequence
  chemically synthesized
gacttaccctgctgccctctcc

SEQ ID NO: 43900 - DNA, 22 bp, Artificial Sequence
  chemically synthesized
accctgctgccctctccccaag

SEQ ID NO: 43901 - DNA, 22 bp, Artificial Sequence
  chemically synthesized
ccctgctgccctctccccaagg

SEQ ID NO: 43902 - DNA, 22 bp, Artificial Sequence
  chemically synthesized
ctgccctctccccaaggcccca

SEQ ID NO: 43903 - DNA, 22 bp, Artificial Sequence
  chemically synthesized
ccctctccccaaggccccatca

SEQ ID NO: 43904 - DNA, 22 bp, Artificial Sequence
  chemically synthesized
tccccaaggccccatcagggag

SEQ ID NO: 43905 - DNA, 22 bp, Artificial Sequence
  chemically synthesized
cccaaggccccatcagggaggg

SEQ ID NO: 43906 - DNA, 22 bp, Artificial Sequence
  chemically synthesized
caatcctcttgtcacctgtggc

SEQ ID NO: 43907 - DNA, 22 bp, Artificial Sequence
  chemically synthesized
aatcctcttgtcacctgtggcc

SEQ ID NO: 43908 - DNA, 22 bp, Artificial Sequence
  chemically synthesized
ttgtcacctgtggcctacctgc

SEQ ID NO: 43909 - DNA, 22 bp, Artificial Sequence
  chemically synthesized
gtcacctgtggcctacctgccc

SEQ ID NO: 43910 - DNA, 22 bp, Artificial Sequence
  chemically synthesized
tcacctgtggcctacctgccct

SEQ ID NO: 43911 - DNA, 22 bp, Artificial Sequence
  chemically synthesized
tggcctacctgccctcagagat

SEQ ID NO: 43912 - DNA, 22 bp, Artificial Sequence
  chemically synthesized
cctgccctcagagatgacatct

SEQ ID NO: 43913 - DNA, 22 bp, Artificial Sequence
  chemically synthesized
ccctcagagatgacatctctat

SEQ ID NO: 43914 - DNA, 22 bp, Artificial Sequence
  chemically synthesized
agagatgacatctctatgtcgg

SEQ ID NO: 43915 - DNA, 22 bp, Artificial Sequence
  chemically synthesized
tatgtcggccactggatggcag

SEQ ID NO: 43916 - DNA, 22 bp, Artificial Sequence
  chemically synthesized
tgtcggccactggatggcagca

SEQ ID NO: 43917 - DNA, 22 bp, Artificial Sequence
  chemically synthesized
gatggcagcacctactcgcaga

SEQ ID NO: 43918 - DNA, 22 bp, Artificial Sequence
  chemically synthesized
ctcgcagaccacatcaactttc

SEQ ID NO: 43919 - DNA, 22 bp, Artificial Sequence
  chemically synthesized
gcagaccacatcaactttcctg

SEQ ID NO: 43920 - DNA, 22 bp, Artificial Sequence
  chemically synthesized
tcctggcaacttgcggtaggtt

SEQ ID NO: 43921 - DNA, 22 bp, Artificial Sequence
  chemically synthesized
cctggcaacttgcggtaggttt

SEQ ID NO: 43922 - DNA, 22 bp, Artificial Sequence
  chemically synthesized
ctggcaacttgcggtaggtttt

SEQ ID NO: 43923 - DNA, 22 bp, Artificial Sequence
  chemically synthesized
gcaacttgcggtaggttttcac

SEQ ID NO: 43924 - DNA, 22 bp, Artificial Sequence
  chemically synthesized
gcggtaggttttcaccattatc

SEQ ID NO: 43925 - DNA, 22 bp, Artificial Sequence
  chemically synthesized
cggtaggttttcaccattatca

SEQ ID NO: 43926 - DNA, 22 bp, Artificial Sequence
  chemically synthesized
tcaccattatcaggatgtttgc

SEQ ID NO: 43927 - DNA, 22 bp, Artificial Sequence
  chemically synthesized
caccattatcaggatgtttgcc

SEQ ID NO: 43928 - DNA, 22 bp, Artificial Sequence
  chemically synthesized
accattatcaggatgtttgcct

SEQ ID NO: 43929 - DNA, 22 bp, Artificial Sequence
  chemically synthesized
tcaggatgtttgccttgctcaa

SEQ ID NO: 43930 - DNA, 22 bp, Artificial Sequence
  chemically synthesized
gccttgctcaaatagcagattc

SEQ ID NO: 43931 - DNA, 22 bp, Artificial Sequence
  chemically synthesized
ccttgctcaaatagcagattct

SEQ ID NO: 43932 - DNA, 22 bp, Artificial Sequence
  chemically synthesized
gctcaaatagcagattctagag

SEQ ID NO: 43933 - DNA, 22 bp, Artificial Sequence
  chemically synthesized
ctcaaatagcagattctagaga

SEQ ID NO: 43934 - DNA, 22 bp, Artificial Sequence
  chemically synthesized
aaatagcagattctagagaacg

SEQ ID NO: 43935 - DNA, 22 bp, Artificial Sequence
  chemically synthesized
tagagaacggtgctccctcaca

SEQ ID NO: 43936 - DNA, 22 bp, Artificial Sequence
  chemically synthesized
gagaacggtgctccctcacaca

SEQ ID NO: 43937 - DNA, 22 bp, Artificial Sequence
  chemically synthesized
cctcacacaactatgtagtcca

SEQ ID NO: 43938 - DNA, 22 bp, Artificial Sequence
  chemically synthesized
acacaactatgtagtccaggtg

SEQ ID NO: 43939 - DNA, 22 bp, Artificial Sequence
  chemically synthesized
tgtagtccaggtgatgcaccct

SEQ ID NO: 43940 - DNA, 22 bp, Artificial Sequence
  chemically synthesized
tgcccgatgcttggtagtcaga

SEQ ID NO: 43941 - DNA, 22 bp, Artificial Sequence
  chemically synthesized
cccgatgcttggtagtcagaaa

SEQ ID NO: 43942 - DNA, 22 bp, Artificial Sequence
  chemically synthesized
ggtagtcagaaacttccatcat

SEQ ID NO: 43943 - DNA, 22 bp, Artificial Sequence
  chemically synthesized
gtagtcagaaacttccatcatg

SEQ ID NO: 43944 - DNA, 22 bp, Artificial Sequence
  chemically synthesized
ccatcatgcagctctgcccaga

SEQ ID NO: 43945 - DNA, 22 bp, Artificial Sequence
  chemically synthesized
catcatgcagctctgcccagat

SEQ ID NO: 43946 - DNA, 22 bp, Artificial Sequence
  chemically synthesized
tgcccagattgagctgagctgg

SEQ ID NO: 43947 - DNA, 22 bp, Artificial Sequence
  chemically synthesized
cccagattgagctgagctggcc

SEQ ID NO: 43948 - DNA, 22 bp, Artificial Sequence
  chemically synthesized
agctgagctggcctctggagtg

SEQ ID NO: 43949 - DNA, 22 bp, Artificial Sequence
  chemically synthesized
agctggcctctggagtgaggtg

SEQ ID NO: 43950 - DNA, 22 bp, Artificial Sequence
  chemically synthesized
gcctctggagtgaggtgctggg

SEQ ID NO: 43951 - DNA, 22 bp, Artificial Sequence
  chemically synthesized
tggagtgaggtgctgggacaaa

SEQ ID NO: 43952 - DNA, 22 bp, Artificial Sequence
  chemically synthesized
gagtgaggtgctgggacaaaca

SEQ ID NO: 43953 - DNA, 22 bp, Artificial Sequence
  chemically synthesized
ggacaaacatcttccatgctgc

SEQ ID NO: 43954 - DNA, 22 bp, Artificial Sequence
  chemically synthesized
ccatgctgctcatgtcaactcc

SEQ ID NO: 43955 - DNA, 22 bp, Artificial Sequence
  chemically synthesized
catgctgctcatgtcaactcca

SEQ ID NO: 43956 - DNA, 22 bp, Artificial Sequence
  chemically synthesized
ctcatgtcaactccagatgcag

SEQ ID NO: 43957 - DNA, 22 bp, Artificial Sequence
  chemically synthesized
atgtcaactccagatgcagtca

SEQ ID NO: 43958 - DNA, 22 bp, Artificial Sequence
  chemically synthesized
cagatgcagtcaggtttctgaa

SEQ ID NO: 43959 - DNA, 22 bp, Artificial Sequence
  chemically synthesized
ctgaaccaaagtcaatgatcta

SEQ ID NO: 43960 - DNA, 22 bp, Artificial Sequence
  chemically synthesized
tgaaccaaagtcaatgatctaa

SEQ ID NO: 43961 - DNA, 22 bp, Artificial Sequence
  chemically synthesized
aaccaaagtcaatgatctaagt

SEQ ID NO: 43962 - DNA, 22 bp, Artificial Sequence
  chemically synthesized
agtgcagtcaaaggctctgggg

SEQ ID NO: 43963 - DNA, 22 bp, Artificial Sequence
  chemically synthesized
tgggggaagaaagagagagtgc

SEQ ID NO: 43964 - DNA, 22 bp, Artificial Sequence
  chemically synthesized
ggggaagaaagagagagtgcct

SEQ ID NO: 43965 - DNA, 22 bp, Artificial Sequence
  chemically synthesized
atctcttgcctgtgccatgctc

SEQ ID NO: 43966 - DNA, 22 bp, Artificial Sequence
  chemically synthesized
ttgcctgtgccatgctcgcaaa

SEQ ID NO: 43967 - DNA, 22 bp, Artificial Sequence
  chemically synthesized
gcctgtgccatgctcgcaaagc

SEQ ID NO: 43968 - DNA, 22 bp, Artificial Sequence
  chemically synthesized
cctgtgccatgctcgcaaagca

SEQ ID NO: 43969 - DNA, 22 bp, Artificial Sequence
  chemically synthesized
tgccatgctcgcaaagcaagga

SEQ ID NO: 43970 - DNA, 22 bp, Artificial Sequence
  chemically synthesized
gcaaagcaaggatttttgcaaa

SEQ ID NO: 43971 - DNA, 22 bp, Artificial Sequence
  chemically synthesized
ttgcaaaattctaatgaaagct

SEQ ID NO: 43972 - DNA, 22 bp, Artificial Sequence
  chemically synthesized
tgcaaaattctaatgaaagctg

SEQ ID NO: 43973 - DNA, 22 bp, Artificial Sequence
  chemically synthesized
gcaaaattctaatgaaagctgg

SEQ ID NO: 43974 - DNA, 22 bp, Artificial Sequence
  chemically synthesized
caaaattctaatgaaagctggg

SEQ ID NO: 43975 - DNA, 22 bp, Artificial Sequence
  chemically synthesized
taatgaaagctgggcttgcaaa

SEQ ID NO: 43976 - DNA, 22 bp, Artificial Sequence
  chemically synthesized
atgaaagctgggcttgcaaaat

SEQ ID NO: 43977 - DNA, 22 bp, Artificial Sequence
  chemically synthesized
ggcttgcaaaattagaaaactg

SEQ ID NO: 43978 - DNA, 22 bp, Artificial Sequence
  chemically synthesized
gcaaaattagaaaactggatta

SEQ ID NO: 43979 - DNA, 22 bp, Artificial Sequence
  chemically synthesized
caaaattagaaaactggattat

SEQ ID NO: 43980 - DNA, 22 bp, Artificial Sequence
  chemically synthesized
gaaaactggattatttgtgaga

SEQ ID NO: 43981 - DNA, 22 bp, Artificial Sequence
  chemically synthesized
gattatttgtgagaacactgaa

SEQ ID NO: 43982 - DNA, 22 bp, Artificial Sequence
  chemically synthesized
tttgtgagaacactgaaacatc

SEQ ID NO: 43983 - DNA, 22 bp, Artificial Sequence
  chemically synthesized
gtgagaacactgaaacatccct

SEQ ID NO: 43984 - DNA, 22 bp, Artificial Sequence
  chemically synthesized
tgagaacactgaaacatccctg

SEQ ID NO: 43985 - DNA, 22 bp, Artificial Sequence
  chemically synthesized
aaacatccctgggtgtgtccat

SEQ ID NO: 43986 - DNA, 22 bp, Artificial Sequence
  chemically synthesized
ggtgtgtccatctggaaaaaca

SEQ ID NO: 43987 - DNA, 22 bp, Artificial Sequence
  chemically synthesized
gaaaaacagcatttcctctggc

SEQ ID NO: 43988 - DNA, 22 bp, Artificial Sequence
  chemically synthesized
cctctggcaattttgcaaccgt

SEQ ID NO: 43989 - DNA, 22 bp, Artificial Sequence
  chemically synthesized
ctctggcaattttgcaaccgtt

SEQ ID NO: 43990 - DNA, 22 bp, Artificial Sequence
  chemically synthesized
tggcaattttgcaaccgttcta

SEQ ID NO: 43991 - DNA, 22 bp, Artificial Sequence
  chemically synthesized
gcaattttgcaaccgttctatt

SEQ ID NO: 43992 - DNA, 22 bp, Artificial Sequence
  chemically synthesized
tgcaaccgttctatttgaattt

SEQ ID NO: 43993 - DNA, 22 bp, Artificial Sequence
  chemically synthesized
gcaaccgttctatttgaatttg

SEQ ID NO: 43994 - DNA, 22 bp, Artificial Sequence
  chemically synthesized
caaccgttctatttgaatttgg

SEQ ID NO: 43995 - DNA, 22 bp, Artificial Sequence
  chemically synthesized
tatttgaatttggcaaagaaaa

SEQ ID NO: 43996 - DNA, 22 bp, Artificial Sequence
  chemically synthesized
tttgaatttggcaaagaaaata

SEQ ID NO: 43997 - DNA, 22 bp, Artificial Sequence
  chemically synthesized
gaatttggcaaagaaaataaag

SEQ ID NO: 43998 - DNA, 22 bp, Artificial Sequence
  chemically synthesized
aatttggcaaagaaaataaagc

SEQ ID NO: 43999 - DNA, 22 bp, Artificial Sequence
  chemically synthesized
ggcaaagaaaataaagcagttt

SEQ ID NO: 44000 - DNA, 22 bp, Artificial Sequence
  chemically synthesized
gcaaagaaaataaagcagtttt

SEQ ID NO: 44001 - DNA, 22 bp, Artificial Sequence
  chemically synthesized
ttcacaaaagaataaacacaac

SEQ ID NO: 44002 - DNA, 22 bp, Artificial Sequence
  chemically synthesized
tcacaaaagaataaacacaacc

SEQ ID NO: 44003 - DNA, 22 bp, Artificial Sequence
  chemically synthesized
cacaaaagaataaacacaacca

SEQ ID NO: 44004 - DNA, 22 bp, Artificial Sequence
  chemically synthesized
acaaaagaataaacacaaccag

SEQ ID NO: 44005 - DNA, 22 bp, Artificial Sequence
  chemically synthesized
cactctcccaaattgtcaaaga

SEQ ID NO: 44006 - DNA, 22 bp, Artificial Sequence
  chemically synthesized
actctcccaaattgtcaaagaa

SEQ ID NO: 44007 - DNA, 22 bp, Artificial Sequence
  chemically synthesized
tcccaaattgtcaaagaagtat

SEQ ID NO: 44008 - DNA, 22 bp, Artificial Sequence
  chemically synthesized
ccaaattgtcaaagaagtataa

SEQ ID NO: 44009 - DNA, 22 bp, Artificial Sequence
  chemically synthesized
tcaaagaagtataaattagaaa

SEQ ID NO: 44010 - DNA, 22 bp, Artificial Sequence
  chemically synthesized
gaaaatgaatcaggacaatttc

SEQ ID NO: 44011 - DNA, 22 bp, Artificial Sequence
  chemically synthesized
caacctgttagattagctaata

SEQ ID NO: 44012 - DNA, 22 bp, Artificial Sequence
  chemically synthesized
aacctgttagattagctaatat

SEQ ID NO: 44013 - DNA, 22 bp, Artificial Sequence
  chemically synthesized
ttagattagctaatatttaaaa

SEQ ID NO: 44014 - DNA, 22 bp, Artificial Sequence
  chemically synthesized
gattagctaatatttaaaaatt

SEQ ID NO: 44015 - DNA, 22 bp, Artificial Sequence
  chemically synthesized
gctaatatttaaaaattgaaca

SEQ ID NO: 44016 - DNA, 22 bp, Artificial Sequence
  chemically synthesized
atatttaaaaattgaacactca

SEQ ID NO: 44017 - DNA, 22 bp, Artificial Sequence
  chemically synthesized
aaaaattgaacactcatacaag

SEQ ID NO: 44018 - DNA, 22 bp, Artificial Sequence
  chemically synthesized
aaaattgaacactcatacaagt

SEQ ID NO: 44019 - DNA, 22 bp, Artificial Sequence
  chemically synthesized
aacactcatacaagtgtggtga

SEQ ID NO: 44020 - DNA, 22 bp, Artificial Sequence
  chemically synthesized
atacaagtgtggtgaagtgatt

SEQ ID NO: 44021 - DNA, 22 bp, Artificial Sequence
  chemically synthesized
ttttctagtgacattttacact

SEQ ID NO: 44022 - DNA, 22 bp, Artificial Sequence
  chemically synthesized
tctagtgacattttacactgtc

SEQ ID NO: 44023 - DNA, 22 bp, Artificial Sequence
  chemically synthesized
ctagtgacattttacactgtca

SEQ ID NO: 44024 - DNA, 22 bp, Artificial Sequence
  chemically synthesized
tagtgacattttacactgtcat

SEQ ID NO: 44025 - DNA, 22 bp, Artificial Sequence
  chemically synthesized
gtgacattttacactgtcataa

SEQ ID NO: 44026 - DNA, 22 bp, Artificial Sequence
  chemically synthesized
tacactgtcataaccttctaga

SEQ ID NO: 44027 - DNA, 22 bp, Artificial Sequence
  chemically synthesized
acactgtcataaccttctagaa

SEQ ID NO: 44028 - DNA, 22 bp, Artificial Sequence
  chemically synthesized
cactgtcataaccttctagaaa

SEQ ID NO: 44029 - DNA, 22 bp, Artificial Sequence
  chemically synthesized
tcataaccttctagaaaataaa

SEQ ID NO: 44030 - DNA, 22 bp, Artificial Sequence
  chemically synthesized
ctagaaaataaattggcagtgt

SEQ ID NO: 44031 - DNA, 22 bp, Artificial Sequence
  chemically synthesized
tagaaaataaattggcagtgtt

SEQ ID NO: 44032 - DNA, 22 bp, Artificial Sequence
  chemically synthesized
gaaaataaattggcagtgttat

SEQ ID NO: 44033 - DNA, 22 bp, Artificial Sequence
  chemically synthesized
gcagtgttattgggagacagaa

SEQ ID NO: 44034 - DNA, 22 bp, Artificial Sequence
  chemically synthesized
ttgggagacagaaatatgtcta

SEQ ID NO: 44035 - DNA, 22 bp, Artificial Sequence
  chemically synthesized
ggagacagaaatatgtctatat

SEQ ID NO: 44036 - DNA, 22 bp, Artificial Sequence
  chemically synthesized
tataatttatgggaacttaggc

SEQ ID NO: 44037 - DNA, 22 bp, Artificial Sequence
  chemically synthesized
atgggaacttaggctcagaaaa

SEQ ID NO: 44038 - DNA, 22 bp, Artificial Sequence
  chemically synthesized
tgggaacttaggctcagaaaat

SEQ ID NO: 44039 - DNA, 22 bp, Artificial Sequence
  chemically synthesized
aggctcagaaaatattaaggaa

SEQ ID NO: 44040 - DNA, 22 bp, Artificial Sequence
  chemically synthesized
ggctcagaaaatattaaggaat

SEQ ID NO: 44041 - DNA, 22 bp, Artificial Sequence
  chemically synthesized
agaaaatattaaggaataagaa

SEQ ID NO: 44042 - DNA, 22 bp, Artificial Sequence
  chemically synthesized
aggaataagaatgaactttatg

SEQ ID NO: 44043 - DNA, 22 bp, Artificial Sequence
  chemically synthesized
tatgaacaaagatgtggagggt

SEQ ID NO: 44044 - DNA, 22 bp, Artificial Sequence
  chemically synthesized
atgaacaaagatgtggagggtt

SEQ ID NO: 44045 - DNA, 22 bp, Artificial Sequence
  chemically synthesized
tgaacaaagatgtggagggttg

SEQ ID NO: 44046 - DNA, 22 bp, Artificial Sequence
  chemically synthesized
gaagcaagaggggggccaacgc

SEQ ID NO: 44047 - DNA, 22 bp, Artificial Sequence
  chemically synthesized
gggcagtgactccgcagaccca

SEQ ID NO: 44048 - DNA, 22 bp, Artificial Sequence
  chemically synthesized
ggcagtgactccgcagacccag

SEQ ID NO: 44049 - DNA, 22 bp, Artificial Sequence
  chemically synthesized
cgcagacccaggctcaggttga

SEQ ID NO: 44050 - DNA, 22 bp, Artificial Sequence
  chemically synthesized
aggttgaactagacaacctcct

SEQ ID NO: 44051 - DNA, 22 bp, Artificial Sequence
  chemically synthesized
aactagacaacctccttacacc

SEQ ID NO: 44052 - DNA, 22 bp, Artificial Sequence
  chemically synthesized
gacaacctccttacacctcagt

SEQ ID NO: 44053 - DNA, 22 bp, Artificial Sequence
  chemically synthesized
cttacacctcagtttccttaac

SEQ ID NO: 44054 - DNA, 22 bp, Artificial Sequence
  chemically synthesized
acacctcagtttccttaactgt

SEQ ID NO: 44055 - DNA, 22 bp, Artificial Sequence
  chemically synthesized
cacctcagtttccttaactgta

SEQ ID NO: 44056 - DNA, 22 bp, Artificial Sequence
  chemically synthesized
agtttccttaactgtagagcag

SEQ ID NO: 44057 - DNA, 22 bp, Artificial Sequence
  chemically synthesized
ccttaactgtagagcaggagtg

SEQ ID NO: 44058 - DNA, 22 bp, Artificial Sequence
  chemically synthesized
cttaactgtagagcaggagtga

SEQ ID NO: 44059 - DNA, 22 bp, Artificial Sequence
  chemically synthesized
aactgtagagcaggagtgatgg

SEQ ID NO: 44060 - DNA, 22 bp, Artificial Sequence
  chemically synthesized
actgtagagcaggagtgatgga

SEQ ID NO: 44061 - DNA, 22 bp, Artificial Sequence
  chemically synthesized
tagagcaggagtgatggaactg

SEQ ID NO: 44062 - DNA, 22 bp, Artificial Sequence
  chemically synthesized
cctgtttcataggactgttgtg

SEQ ID NO: 44063 - DNA, 22 bp, Artificial Sequence
  chemically synthesized
tttcataggactgttgtgagga

SEQ ID NO: 44064 - DNA, 22 bp, Artificial Sequence
  chemically synthesized
cataggactgttgtgaggatga

SEQ ID NO: 44065 - DNA, 22 bp, Artificial Sequence
  chemically synthesized
ataggactgttgtgaggatgaa

SEQ ID NO: 44066 - DNA, 22 bp, Artificial Sequence
  chemically synthesized
ttgtgaggatgaagtgagatac

SEQ ID NO: 44067 - DNA, 22 bp, Artificial Sequence
  chemically synthesized
tgaggatgaagtgagatacacc

SEQ ID NO: 44068 - DNA, 22 bp, Artificial Sequence
  chemically synthesized
taagcttgtgcctggaaaggat

SEQ ID NO: 44069 - DNA, 22 bp, Artificial Sequence
  chemically synthesized
gtgcctggaaaggataatgctt

SEQ ID NO: 44070 - DNA, 22 bp, Artificial Sequence
  chemically synthesized
tgcctggaaaggataatgctta

SEQ ID NO: 44071 - DNA, 22 bp, Artificial Sequence
  chemically synthesized
gaaaggataatgcttagtaaat

SEQ ID NO: 44072 - DNA, 22 bp, Artificial Sequence
  chemically synthesized
agtaaatgatgactattctttt

SEQ ID NO: 44073 - DNA, 22 bp, Artificial Sequence
  chemically synthesized
gtaaatgatgactattcttttt

SEQ ID NO: 44074 - DNA, 22 bp, Artificial Sequence
  chemically synthesized
ttcttttttattgcaataaaat

SEQ ID NO: 44075 - DNA, 22 bp, Artificial Sequence
  chemically synthesized
ttttttattgcaataaaatgta

SEQ ID NO: 44076 - DNA, 22 bp, Artificial Sequence
  chemically synthesized
ttttattgcaataaaatgtaca

SEQ ID NO: 44077 - DNA, 22 bp, Artificial Sequence
  chemically synthesized
tttattgcaataaaatgtacac

SEQ ID NO: 44078 - DNA, 22 bp, Artificial Sequence
  chemically synthesized
ttattgcaataaaatgtacaca

SEQ ID NO: 44079 - DNA, 22 bp, Artificial Sequence
  chemically synthesized
tattgcaataaaatgtacacag

SEQ ID NO: 44080 - DNA, 22 bp, Artificial Sequence
  chemically synthesized
attgcaataaaatgtacacagc

SEQ ID NO: 44081 - DNA, 22 bp, Artificial Sequence
  chemically synthesized
ttgcaataaaatgtacacagcg

SEQ ID NO: 44082 - DNA, 22 bp, Artificial Sequence
  chemically synthesized
caataaaatgtacacagcgtaa

SEQ ID NO: 44083 - DNA, 22 bp, Artificial Sequence
  chemically synthesized
ctattttaaccatttttgcagg

SEQ ID NO: 44084 - DNA, 22 bp, Artificial Sequence
  chemically synthesized
ttttaaccatttttgcagggta

SEQ ID NO: 44085 - DNA, 22 bp, Artificial Sequence
  chemically synthesized
taaccatttttgcagggtacca

SEQ ID NO: 44086 - DNA, 22 bp, Artificial Sequence
  chemically synthesized
aaccatttttgcagggtaccac

SEQ ID NO: 44087 - DNA, 22 bp, Artificial Sequence
  chemically synthesized
accatttttgcagggtaccacc

SEQ ID NO: 44088 - DNA, 22 bp, Artificial Sequence
  chemically synthesized
ttgcagggtaccaccaagtggc

SEQ ID NO: 44089 - DNA, 22 bp, Artificial Sequence
  chemically synthesized
tgcagggtaccaccaagtggca

SEQ ID NO: 44090 - DNA, 22 bp, Artificial Sequence
  chemically synthesized
gcagggtaccaccaagtggcat

SEQ ID NO: 44091 - DNA, 22 bp, Artificial Sequence
  chemically synthesized
cagggtaccaccaagtggcatt

SEQ ID NO: 44092 - DNA, 22 bp, Artificial Sequence
  chemically synthesized
agtacattcacagtggtgtgca

SEQ ID NO: 44093 - DNA, 22 bp, Artificial Sequence
  chemically synthesized
gtacattcacagtggtgtgcaa

SEQ ID NO: 44094 - DNA, 22 bp, Artificial Sequence
  chemically synthesized
acagtggtgtgcaaccatcatc

SEQ ID NO: 44095 - DNA, 22 bp, Artificial Sequence
  chemically synthesized
ccagaatattttcctcatcccc

SEQ ID NO: 44096 - DNA, 22 bp, Artificial Sequence
  chemically synthesized
cagaatattttcctcatcccca

SEQ ID NO: 44097 - DNA, 22 bp, Artificial Sequence
  chemically synthesized
tcctcatccccaaaggaaacct

SEQ ID NO: 44098 - DNA, 22 bp, Artificial Sequence
  chemically synthesized
cctcatccccaaaggaaacctc

SEQ ID NO: 44099 - DNA, 22 bp, Artificial Sequence
  chemically synthesized
ctcatccccaaaggaaacctca

SEQ ID NO: 44100 - DNA, 22 bp, Artificial Sequence
  chemically synthesized
atccccaaaggaaacctcatgc

SEQ ID NO: 44101 - DNA, 22 bp, Artificial Sequence
  chemically synthesized
atgctcattaatcagtagctct

SEQ ID NO: 44102 - DNA, 22 bp, Artificial Sequence
  chemically synthesized
attaatcagtagctctccttta

SEQ ID NO: 44103 - DNA, 22 bp, Artificial Sequence
  chemically synthesized
atcagtagctctcctttaaaat

SEQ ID NO: 44104 - DNA, 22 bp, Artificial Sequence
  chemically synthesized
tcctttaaaatattagttatga

SEQ ID NO: 44105 - DNA, 22 bp, Artificial Sequence
  chemically synthesized
ctttaaaatattagttatgaag

SEQ ID NO: 44106 - DNA, 22 bp, Artificial Sequence
  chemically synthesized
taaaatattagttatgaagatc

SEQ ID NO: 44107 - DNA, 22 bp, Artificial Sequence
  chemically synthesized
aaaatattagttatgaagatca

SEQ ID NO: 44108 - DNA, 22 bp, Artificial Sequence
  chemically synthesized
aaatattagttatgaagatcat

SEQ ID NO: 44109 - DNA, 22 bp, Artificial Sequence
  chemically synthesized
gttatgaagatcatagcactat

SEQ ID NO: 44110 - DNA, 22 bp, Artificial Sequence
  chemically synthesized
tgaagatcatagcactatacaa

SEQ ID NO: 44111 - DNA, 22 bp, Artificial Sequence
  chemically synthesized
tacaaaactcattatgtaatgt

SEQ ID NO: 44112 - DNA, 22 bp, Artificial Sequence
  chemically synthesized
attatgtaatgttgagtgaaaa

SEQ ID NO: 44113 - DNA, 22 bp, Artificial Sequence
  chemically synthesized
tgtaatgttgagtgaaaaaatc

SEQ ID NO: 44114 - DNA, 22 bp, Artificial Sequence
  chemically synthesized
agtgaaaaaatcagggtgtgaa

SEQ ID NO: 44115 - DNA, 22 bp, Artificial Sequence
  chemically synthesized
tgtgatatgatgtaattagtga

SEQ ID NO: 44116 - DNA, 22 bp, Artificial Sequence
  chemically synthesized
gtgatatgatgtaattagtgaa

SEQ ID NO: 44117 - DNA, 22 bp, Artificial Sequence
  chemically synthesized
tgatatgatgtaattagtgaaa

SEQ ID NO: 44118 - DNA, 22 bp, Artificial Sequence
  chemically synthesized
gtgaaagaagcatacaaaaagt

SEQ ID NO: 44119 - DNA, 22 bp, Artificial Sequence
  chemically synthesized
aaaatataaaaacaatagcaat

SEQ ID NO: 44120 - DNA, 22 bp, Artificial Sequence
  chemically synthesized
catttctcagactctacattta

SEQ ID NO: 44121 - DNA, 22 bp, Artificial Sequence
  chemically synthesized
ctcagactctacatttaaacat

SEQ ID NO: 44122 - DNA, 22 bp, Artificial Sequence
  chemically synthesized
tcagactctacatttaaacatt

SEQ ID NO: 44123 - DNA, 22 bp, Artificial Sequence
  chemically synthesized
agactctacatttaaacattat

SEQ ID NO: 44124 - DNA, 22 bp, Artificial Sequence
  chemically synthesized
tacatttaaacattattcttta

SEQ ID NO: 44125 - DNA, 22 bp, Artificial Sequence
  chemically synthesized
catttaaacattattctttatg

SEQ ID NO: 44126 - DNA, 22 bp, Artificial Sequence
  chemically synthesized
aaacattattctttatggtttt

SEQ ID NO: 44127 - DNA, 22 bp, Artificial Sequence
  chemically synthesized
aacattattctttatggtttta

SEQ ID NO: 44128 - DNA, 22 bp, Artificial Sequence
  chemically synthesized
ttctttatggttttaaaagcaa

SEQ ID NO: 44129 - DNA, 22 bp, Artificial Sequence
  chemically synthesized
tttatggttttaaaagcaaaga

SEQ ID NO: 44130 - DNA, 22 bp, Artificial Sequence
  chemically synthesized
tatggttttaaaagcaaagaaa

SEQ ID NO: 44131 - DNA, 22 bp, Artificial Sequence
  chemically synthesized
atggttttaaaagcaaagaaaa

SEQ ID NO: 44132 - DNA, 22 bp, Artificial Sequence
  chemically synthesized
tggttttaaaagcaaagaaaaa

SEQ ID NO: 44133 - DNA, 22 bp, Artificial Sequence
  chemically synthesized
taaaagcaaagaaaaaggtaaa

SEQ ID NO: 44134 - DNA, 22 bp, Artificial Sequence
  chemically synthesized
aaaagcaaagaaaaaggtaaag

SEQ ID NO: 44135 - DNA, 22 bp, Artificial Sequence
  chemically synthesized
aaagcaaagaaaaaggtaaaga

SEQ ID NO: 44136 - DNA, 22 bp, Artificial Sequence
  chemically synthesized
agattgttaaatccaggttttt

SEQ ID NO: 44137 - DNA, 22 bp, Artificial Sequence
  chemically synthesized
ttaaatccaggtttttggaaca

SEQ ID NO: 44138 - DNA, 22 bp, Artificial Sequence
  chemically synthesized
aatccaggtttttggaacatag

SEQ ID NO: 44139 - DNA, 22 bp, Artificial Sequence
  chemically synthesized
ttggaacatagactcttatatg

SEQ ID NO: 44140 - DNA, 22 bp, Artificial Sequence
  chemically synthesized
tggaacatagactcttatatga

SEQ ID NO: 44141 - DNA, 22 bp, Artificial Sequence
  chemically synthesized
ggaacatagactcttatatgac

SEQ ID NO: 44142 - DNA, 22 bp, Artificial Sequence
  chemically synthesized
gaacatagactcttatatgacg

SEQ ID NO: 44143 - DNA, 22 bp, Artificial Sequence
  chemically synthesized
ttatatgacgtttacactctcc

SEQ ID NO: 44144 - DNA, 22 bp, Artificial Sequence
  chemically synthesized
atatgacgtttacactctccag

SEQ ID NO: 44145 - DNA, 22 bp, Artificial Sequence
  chemically synthesized
tatgacgtttacactctccagg

SEQ ID NO: 44146 - DNA, 22 bp, Artificial Sequence
  chemically synthesized
acactctccagggttcagagag

SEQ ID NO: 44147 - DNA, 22 bp, Artificial Sequence
  chemically synthesized
cactctccagggttcagagagt

SEQ ID NO: 44148 - DNA, 22 bp, Artificial Sequence
  chemically synthesized
tccagggttcagagagtctggc

SEQ ID NO: 44149 - DNA, 22 bp, Artificial Sequence
  chemically synthesized
cagggttcagagagtctggcag

SEQ ID NO: 44150 - DNA, 22 bp, Artificial Sequence
  chemically synthesized
agagagtctggcagcattggga

SEQ ID NO: 44151 - DNA, 22 bp, Artificial Sequence
  chemically synthesized
gcagcattgggagctgccttgt

SEQ ID NO: 44152 - DNA, 22 bp, Artificial Sequence
  chemically synthesized
ggagctgccttgtgttctacag

SEQ ID NO: 44153 - DNA, 22 bp, Artificial Sequence
  chemically synthesized
ccttgtgttctacagcctcacg

SEQ ID NO: 44154 - DNA, 22 bp, Artificial Sequence
  chemically synthesized
gtgttctacagcctcacggaca

SEQ ID NO: 44155 - DNA, 22 bp, Artificial Sequence
  chemically synthesized
tgttctacagcctcacggacag

SEQ ID NO: 44156 - DNA, 22 bp, Artificial Sequence
  chemically synthesized
tacagcctcacggacagacagg

SEQ ID NO: 44157 - DNA, 22 bp, Artificial Sequence
  chemically synthesized
cagcctcacggacagacaggag

SEQ ID NO: 44158 - DNA, 22 bp, Artificial Sequence
  chemically synthesized
acggacagacaggaggtccatc

SEQ ID NO: 44159 - DNA, 22 bp, Artificial Sequence
  chemically synthesized
ctctgttcttctggagtttcct

SEQ ID NO: 44160 - DNA, 22 bp, Artificial Sequence
  chemically synthesized
tgttcttctggagtttccttgt

SEQ ID NO: 44161 - DNA, 22 bp, Artificial Sequence
  chemically synthesized
ttcttctggagtttccttgtga

SEQ ID NO: 44162 - DNA, 22 bp, Artificial Sequence
  chemically synthesized
ttctggagtttccttgtgaaca

SEQ ID NO: 44163 - DNA, 22 bp, Artificial Sequence
  chemically synthesized
ctggagtttccttgtgaacatg

SEQ ID NO: 44164 - DNA, 22 bp, Artificial Sequence
  chemically synthesized
tggagtttccttgtgaacatgt

SEQ ID NO: 44165 - DNA, 22 bp, Artificial Sequence
  chemically synthesized
gagtttccttgtgaacatgttg

SEQ ID NO: 44166 - DNA, 22 bp, Artificial Sequence
  chemically synthesized
ccttgtgaacatgttgtggacg

SEQ ID NO: 44167 - DNA, 22 bp, Artificial Sequence
  chemically synthesized
cttgtgaacatgttgtggacgt

SEQ ID NO: 44168 - DNA, 22 bp, Artificial Sequence
  chemically synthesized
gtgaacatgttgtggacgtagt

SEQ ID NO: 44169 - DNA, 22 bp, Artificial Sequence
  chemically synthesized
tgaacatgttgtggacgtagtt

SEQ ID NO: 44170 - DNA, 22 bp, Artificial Sequence
  chemically synthesized
tggacgtagttaccatttcttt

SEQ ID NO: 44171 - DNA, 22 bp, Artificial Sequence
  chemically synthesized
ccatttctttcatctttttaaa

SEQ ID NO: 44172 - DNA, 22 bp, Artificial Sequence
  chemically synthesized
ctttcatctttttaaacacagg

SEQ ID NO: 44173 - DNA, 22 bp, Artificial Sequence
  chemically synthesized
tttcatctttttaaacacaggt

SEQ ID NO: 44174 - DNA, 22 bp, Artificial Sequence
  chemically synthesized
tcatctttttaaacacaggtac

SEQ ID NO: 44175 - DNA, 22 bp, Artificial Sequence
  chemically synthesized
catctttttaaacacaggtacc

SEQ ID NO: 44176 - DNA, 22 bp, Artificial Sequence
  chemically synthesized
atctttttaaacacaggtacct

SEQ ID NO: 44177 - DNA, 22 bp, Artificial Sequence
  chemically synthesized
tttaaacacaggtacctttggg

SEQ ID NO: 44178 - DNA, 22 bp, Artificial Sequence
  chemically synthesized
ttaaacacaggtacctttgggg

SEQ ID NO: 44179 - DNA, 22 bp, Artificial Sequence
  chemically synthesized
taaacacaggtacctttggggc

SEQ ID NO: 44180 - DNA, 22 bp, Artificial Sequence
  chemically synthesized
aaacacaggtacctttggggct

SEQ ID NO: 44181 - DNA, 22 bp, Artificial Sequence
  chemically synthesized
aacacaggtacctttggggctg

SEQ ID NO: 44182 - DNA, 22 bp, Artificial Sequence
  chemically synthesized
tggggctggctttctcaaggaa

SEQ ID NO: 44183 - DNA, 22 bp, Artificial Sequence
  chemically synthesized
ggggctggctttctcaaggaag

SEQ ID NO: 44184 - DNA, 22 bp, Artificial Sequence
  chemically synthesized
gggctggctttctcaaggaagc

SEQ ID NO: 44185 - DNA, 22 bp, Artificial Sequence
  chemically synthesized
gctttctcaaggaagcccagct

SEQ ID NO: 44186 - DNA, 22 bp, Artificial Sequence
  chemically synthesized
tctcaaggaagcccagctccct

SEQ ID NO: 44187 - DNA, 22 bp, Artificial Sequence
  chemically synthesized
ctcaaggaagcccagctccctg

SEQ ID NO: 44188 - DNA, 22 bp, Artificial Sequence
  chemically synthesized
tcaaggaagcccagctccctgt

SEQ ID NO: 44189 - DNA, 22 bp, Artificial Sequence
  chemically synthesized
aaggaagcccagctccctgtga

SEQ ID NO: 44190 - DNA, 22 bp, Artificial Sequence
  chemically synthesized
cctgtgattgagaatgaagtgt

SEQ ID NO: 44191 - DNA, 22 bp, Artificial Sequence
  chemically synthesized
tgattgagaatgaagtgtgcaa

SEQ ID NO: 44192 - DNA, 22 bp, Artificial Sequence
  chemically synthesized
agaatgaagtgtgcaatcgcta

SEQ ID NO: 44193 - DNA, 22 bp, Artificial Sequence
  chemically synthesized
tgagtttctgaatggaagagtc

SEQ ID NO: 44194 - DNA, 22 bp, Artificial Sequence
  chemically synthesized
ctgaatggaagagtcaaatcca

SEQ ID NO: 44195 - DNA, 22 bp, Artificial Sequence
  chemically synthesized
tgaatggaagagtcaaatccac

SEQ ID NO: 44196 - DNA, 22 bp, Artificial Sequence
  chemically synthesized
aatggaagagtcaaatccactg

SEQ ID NO: 44197 - DNA, 22 bp, Artificial Sequence
  chemically synthesized
agctctgtgctgggcatttggc

SEQ ID NO: 44198 - DNA, 22 bp, Artificial Sequence
  chemically synthesized
tgtgctgggcatttggctggag

SEQ ID NO: 44199 - DNA, 22 bp, Artificial Sequence
  chemically synthesized
tgctgggcatttggctggaggc

SEQ ID NO: 44200 - DNA, 22 bp, Artificial Sequence
  chemically synthesized
ggcatttggctggaggcattga

SEQ ID NO: 44201 - DNA, 22 bp, Artificial Sequence
  chemically synthesized
ggctggaggcattgacagttgc

SEQ ID NO: 44202 - DNA, 22 bp, Artificial Sequence
  chemically synthesized
gctggaggcattgacagttgca

SEQ ID NO: 44203 - DNA, 22 bp, Artificial Sequence
  chemically synthesized
gaggcattgacagttgcaaggt

SEQ ID NO: 44204 - DNA, 22 bp, Artificial Sequence
  chemically synthesized
acagttgcaaggtaagaaaaga

SEQ ID NO: 44205 - DNA, 22 bp, Artificial Sequence
  chemically synthesized
caaggtaagaaaagatcaagag

SEQ ID NO: 44206 - DNA, 22 bp, Artificial Sequence
  chemically synthesized
gtcttgtgctctcctgtctcag

SEQ ID NO: 44207 - DNA, 22 bp, Artificial Sequence
  chemically synthesized
gtgctctcctgtctcagtctca

SEQ ID NO: 44208 - DNA, 22 bp, Artificial Sequence
  chemically synthesized
tgctctcctgtctcagtctcag

SEQ ID NO: 44209 - DNA, 22 bp, Artificial Sequence
  chemically synthesized
tcctgtctcagtctcagtccct

SEQ ID NO: 44210 - DNA, 22 bp, Artificial Sequence
  chemically synthesized
ctgtctcagtctcagtccctta

SEQ ID NO: 44211 - DNA, 22 bp, Artificial Sequence
  chemically synthesized
tctcagtctcagtcccttagac

SEQ ID NO: 44212 - DNA, 22 bp, Artificial Sequence
  chemically synthesized
agtctcagtcccttagacttga

SEQ ID NO: 44213 - DNA, 22 bp, Artificial Sequence
  chemically synthesized
agtcccttagacttgagtccca

SEQ ID NO: 44214 - DNA, 22 bp, Artificial Sequence
  chemically synthesized
agacttgagtcccaaagtagcg

SEQ ID NO: 44215 - DNA, 22 bp, Artificial Sequence
  chemically synthesized
gacttgagtcccaaagtagcga

SEQ ID NO: 44216 - DNA, 22 bp, Artificial Sequence
  chemically synthesized
gagtcccaaagtagcgaattca

SEQ ID NO: 44217 - DNA, 22 bp, Artificial Sequence
  chemically synthesized
agtcccaaagtagcgaattcaa

SEQ ID NO: 44218 - DNA, 22 bp, Artificial Sequence
  chemically synthesized
aagtaggatttaatcaatggaa

SEQ ID NO: 44219 - DNA, 22 bp, Artificial Sequence
  chemically synthesized
aatcaatggaagaccccagtct

SEQ ID NO: 44220 - DNA, 22 bp, Artificial Sequence
  chemically synthesized
atcaatggaagaccccagtcta

SEQ ID NO: 44221 - DNA, 22 bp, Artificial Sequence
  chemically synthesized
agtgttgctcagaaactcccta

SEQ ID NO: 44222 - DNA, 22 bp, Artificial Sequence
  chemically synthesized
ctcagaaactccctagatctgt

SEQ ID NO: 44223 - DNA, 22 bp, Artificial Sequence
  chemically synthesized
agaaactccctagatctgtccc

SEQ ID NO: 44224 - DNA, 22 bp, Artificial Sequence
  chemically synthesized
cctagatctgtcccaaatgtat

SEQ ID NO: 44225 - DNA, 22 bp, Artificial Sequence
  chemically synthesized
gatctgtcccaaatgtatattc

SEQ ID NO: 44226 - DNA, 22 bp, Artificial Sequence
  chemically synthesized
tcccaaatgtatattcagatca

SEQ ID NO: 44227 - DNA, 22 bp, Artificial Sequence
  chemically synthesized
agatcatccaaggggacttctt

SEQ ID NO: 44228 - DNA, 22 bp, Artificial Sequence
  chemically synthesized
cttggggcttgagttccagatc

SEQ ID NO: 44229 - DNA, 22 bp, Artificial Sequence
  chemically synthesized
ttggggcttgagttccagatca

SEQ ID NO: 44230 - DNA, 22 bp, Artificial Sequence
  chemically synthesized
ggggcttgagttccagatcagc

SEQ ID NO: 44231 - DNA, 22 bp, Artificial Sequence
  chemically synthesized
gggcttgagttccagatcagca

SEQ ID NO: 44232 - DNA, 22 bp, Artificial Sequence
  chemically synthesized
gagttccagatcagcagcaagg

SEQ ID NO: 44233 - DNA, 22 bp, Artificial Sequence
  chemically synthesized
agttccagatcagcagcaaggg

SEQ ID NO: 44234 - DNA, 22 bp, Artificial Sequence
  chemically synthesized
cagatcagcagcaagggagcca

SEQ ID NO: 44235 - DNA, 22 bp, Artificial Sequence
  chemically synthesized
cctcagaccactcaccctcctg

SEQ ID NO: 44236 - DNA, 22 bp, Artificial Sequence
  chemically synthesized
agaccactcaccctcctggggt

SEQ ID NO: 44237 - DNA, 22 bp, Artificial Sequence
  chemically synthesized
accctcctggggtgtcccggtg

SEQ ID NO: 44238 - DNA, 22 bp, Artificial Sequence
  chemically synthesized
ctggggtgtcccggtggccagg

SEQ ID NO: 44239 - DNA, 22 bp, Artificial Sequence
  chemically synthesized
gggtgtcccggtggccagggac

SEQ ID NO: 44240 - DNA, 22 bp, Artificial Sequence
  chemically synthesized
aagtggtgatttttctggtagg

SEQ ID NO: 44241 - DNA, 22 bp, Artificial Sequence
  chemically synthesized
ttctggtagggaaggaggtaga

SEQ ID NO: 44242 - DNA, 22 bp, Artificial Sequence
  chemically synthesized
tctggtagggaaggaggtagag

SEQ ID NO: 44243 - DNA, 22 bp, Artificial Sequence
  chemically synthesized
ctggtagggaaggaggtagagg

SEQ ID NO: 44244 - DNA, 22 bp, Artificial Sequence
  chemically synthesized
tggtagggaaggaggtagaggg

SEQ ID NO: 44245 - DNA, 22 bp, Artificial Sequence
  chemically synthesized
gtagggaaggaggtagagggta

SEQ ID NO: 44246 - DNA, 22 bp, Artificial Sequence
  chemically synthesized
actgcacacaatatctgagact

SEQ ID NO: 44247 - DNA, 22 bp, Artificial Sequence
  chemically synthesized
cacacaatatctgagactggag

SEQ ID NO: 44248 - DNA, 22 bp, Artificial Sequence
  chemically synthesized
agactggagctcagatattgct

SEQ ID NO: 44249 - DNA, 22 bp, Artificial Sequence
  chemically synthesized
gagctcagatattgctgatgat

SEQ ID NO: 44250 - DNA, 22 bp, Artificial Sequence
  chemically synthesized
agatattgctgatgatcagagt

SEQ ID NO: 44251 - DNA, 22 bp, Artificial Sequence
  chemically synthesized
ctgatgatcagagttggcgtgt

SEQ ID NO: 44252 - DNA, 22 bp, Artificial Sequence
  chemically synthesized
atgatcagagttggcgtgtctc

SEQ ID NO: 44253 - DNA, 22 bp, Artificial Sequence
  chemically synthesized
gcgtgtctccccaattgattta

SEQ ID NO: 44254 - DNA, 22 bp, Artificial Sequence
  chemically synthesized
cccaattgatttacaactgggg

SEQ ID NO: 44255 - DNA, 22 bp, Artificial Sequence
  chemically synthesized
atttacaactggggcttggata

SEQ ID NO: 44256 - DNA, 22 bp, Artificial Sequence
  chemically synthesized
acaactggggcttggatactgt

SEQ ID NO: 44257 - DNA, 22 bp, Artificial Sequence
  chemically synthesized
caactggggcttggatactgtt

SEQ ID NO: 44258 - DNA, 22 bp, Artificial Sequence
  chemically synthesized
gggcttggatactgttttaaac

SEQ ID NO: 44259 - DNA, 22 bp, Artificial Sequence
  chemically synthesized
ggatactgttttaaacgggagg

SEQ ID NO: 44260 - DNA, 22 bp, Artificial Sequence
  chemically synthesized
gatactgttttaaacgggagga

SEQ ID NO: 44261 - DNA, 22 bp, Artificial Sequence
  chemically synthesized
ttttaaacgggaggagcctcct

SEQ ID NO: 44262 - DNA, 22 bp, Artificial Sequence
  chemically synthesized
taaacgggaggagcctcctaac

SEQ ID NO: 44263 - DNA, 22 bp, Artificial Sequence
  chemically synthesized
aaacgggaggagcctcctaacc

SEQ ID NO: 44264 - DNA, 22 bp, Artificial Sequence
  chemically synthesized
aacgggaggagcctcctaacca

SEQ ID NO: 44265 - DNA, 22 bp, Artificial Sequence
  chemically synthesized
ctaaccatcttgacacaaccac

SEQ ID NO: 44266 - DNA, 22 bp, Artificial Sequence
  chemically synthesized
accatcttgacacaaccactga

SEQ ID NO: 44267 - DNA, 22 bp, Artificial Sequence
  chemically synthesized
gacacaaccactgacgtgacta

SEQ ID NO: 44268 - DNA, 22 bp, Artificial Sequence
  chemically synthesized
acacaaccactgacgtgactac

SEQ ID NO: 44269 - DNA, 22 bp, Artificial Sequence
  chemically synthesized
acgtgactacactagagataga

SEQ ID NO: 44270 - DNA, 22 bp, Artificial Sequence
  chemically synthesized
cactagagatagactctttcca

SEQ ID NO: 44271 - DNA, 22 bp, Artificial Sequence
  chemically synthesized
gagatagactctttccacttaa

SEQ ID NO: 44272 - DNA, 22 bp, Artificial Sequence
  chemically synthesized
tttccacttaattctaccactc

SEQ ID NO: 44273 - DNA, 22 bp, Artificial Sequence
  chemically synthesized
tccacttaattctaccactctt

SEQ ID NO: 44274 - DNA, 22 bp, Artificial Sequence
  chemically synthesized
ccacttaattctaccactcttg

SEQ ID NO: 44275 - DNA, 22 bp, Artificial Sequence
  chemically synthesized
cacttaattctaccactcttgc

SEQ ID NO: 44276 - DNA, 22 bp, Artificial Sequence
  chemically synthesized
aattctaccactcttgctttac

SEQ ID NO: 44277 - DNA, 22 bp, Artificial Sequence
  chemically synthesized
attctaccactcttgctttact

SEQ ID NO: 44278 - DNA, 22 bp, Artificial Sequence
  chemically synthesized
taccactcttgctttacttcat

SEQ ID NO: 44279 - DNA, 22 bp, Artificial Sequence
  chemically synthesized
ccactcttgctttacttcatga

SEQ ID NO: 44280 - DNA, 22 bp, Artificial Sequence
  chemically synthesized
ttgctttacttcatgagaacga

SEQ ID NO: 44281 - DNA, 22 bp, Artificial Sequence
  chemically synthesized
gctttacttcatgagaacgaaa

SEQ ID NO: 44282 - DNA, 22 bp, Artificial Sequence
  chemically synthesized
ctttacttcatgagaacgaaaa

SEQ ID NO: 44283 - DNA, 22 bp, Artificial Sequence
  chemically synthesized
tacttcatgagaacgaaaatgt

SEQ ID NO: 44284 - DNA, 22 bp, Artificial Sequence
  chemically synthesized
acttcatgagaacgaaaatgta

SEQ ID NO: 44285 - DNA, 22 bp, Artificial Sequence
  chemically synthesized
cttcatgagaacgaaaatgtaa

SEQ ID NO: 44286 - DNA, 22 bp, Artificial Sequence
  chemically synthesized
catgagaacgaaaatgtaagat

SEQ ID NO: 44287 - DNA, 22 bp, Artificial Sequence
  chemically synthesized
atgagaacgaaaatgtaagatt

SEQ ID NO: 44288 - DNA, 22 bp, Artificial Sequence
  chemically synthesized
caccatgaattcatttgcggaa

SEQ ID NO: 44289 - DNA, 22 bp, Artificial Sequence
  chemically synthesized
atttgcggaaagattgatacta

SEQ ID NO: 44290 - DNA, 22 bp, Artificial Sequence
  chemically synthesized
gcggaaagattgatactatgct

SEQ ID NO: 44291 - DNA, 22 bp, Artificial Sequence
  chemically synthesized
cggaaagattgatactatgctt

SEQ ID NO: 44292 - DNA, 22 bp, Artificial Sequence
  chemically synthesized
atactatgcttttattttattt

SEQ ID NO: 44293 - DNA, 22 bp, Artificial Sequence
  chemically synthesized
tgcttttattttattttatttt

SEQ ID NO: 44294 - DNA, 22 bp, Artificial Sequence
  chemically synthesized
ttattttattttattttatttt

SEQ ID NO: 44295 - DNA, 22 bp, Artificial Sequence
  chemically synthesized
tattttattttattttatttta

SEQ ID NO: 44296 - DNA, 22 bp, Artificial Sequence
  chemically synthesized
attttattttattttattttat

SEQ ID NO: 44297 - DNA, 22 bp, Artificial Sequence
  chemically synthesized
ttttattttattttattttatt

SEQ ID NO: 44298 - DNA, 22 bp, Artificial Sequence
  chemically synthesized
tattttattttattttatttta

SEQ ID NO: 44299 - DNA, 22 bp, Artificial Sequence
  chemically synthesized
attttattttattttattttat

SEQ ID NO: 44300 - DNA, 22 bp, Artificial Sequence
  chemically synthesized
ttttattttattttattttatt

SEQ ID NO: 44301 - DNA, 22 bp, Artificial Sequence
  chemically synthesized
tattttattttattttatttta

SEQ ID NO: 44302 - DNA, 22 bp, Artificial Sequence
  chemically synthesized
attttattttattttattttat

SEQ ID NO: 44303 - DNA, 22 bp, Artificial Sequence
  chemically synthesized
ttttattttattttattttatt

SEQ ID NO: 44304 - DNA, 22 bp, Artificial Sequence
  chemically synthesized
tattttattttattttatttta

SEQ ID NO: 44305 - DNA, 22 bp, Artificial Sequence
  chemically synthesized
attttattttattttattttat

SEQ ID NO: 44306 - DNA, 22 bp, Artificial Sequence
  chemically synthesized
ttttattttattttattttatt

SEQ ID NO: 44307 - DNA, 22 bp, Artificial Sequence
  chemically synthesized
tattttattttattttatttta

SEQ ID NO: 44308 - DNA, 22 bp, Artificial Sequence
  chemically synthesized
attttattttattttattttat

SEQ ID NO: 44309 - DNA, 22 bp, Artificial Sequence
  chemically synthesized
ttttattttattttattttatt

SEQ ID NO: 44310 - DNA, 22 bp, Artificial Sequence
  chemically synthesized
tattttattttattttattgag

SEQ ID NO: 44311 - DNA, 22 bp, Artificial Sequence
  chemically synthesized
attttattttattttattgaga

SEQ ID NO: 44312 - DNA, 22 bp, Artificial Sequence
  chemically synthesized
ttttattttattttattgagac

SEQ ID NO: 44313 - DNA, 22 bp, Artificial Sequence
  chemically synthesized
tattttattttattgagactct

SEQ ID NO: 44314 - DNA, 22 bp, Artificial Sequence
  chemically synthesized
attttattttattgagactctc

SEQ ID NO: 44315 - DNA, 22 bp, Artificial Sequence
  chemically synthesized
ttttattttattgagactctca

SEQ ID NO: 44316 - DNA, 22 bp, Artificial Sequence
  chemically synthesized
tattttattgagactctcaccc

SEQ ID NO: 44317 - DNA, 22 bp, Artificial Sequence
  chemically synthesized
attttattgagactctcacccc

SEQ ID NO: 44318 - DNA, 22 bp, Artificial Sequence
  chemically synthesized
ttttattgagactctcaccccg

SEQ ID NO: 44319 - DNA, 22 bp, Artificial Sequence
  chemically synthesized
tattgagactctcaccccggtt

SEQ ID NO: 44320 - DNA, 22 bp, Artificial Sequence
  chemically synthesized
attgagactctcaccccggttg

SEQ ID NO: 44321 - DNA, 22 bp, Artificial Sequence
  chemically synthesized
ttgagactctcaccccggttga

SEQ ID NO: 44322 - DNA, 22 bp, Artificial Sequence
  chemically synthesized
agactctcaccccggttgaagt

SEQ ID NO: 44323 - DNA, 22 bp, Artificial Sequence
  chemically synthesized
tcaccccggttgaagtgcactg

SEQ ID NO: 44324 - DNA, 22 bp, Artificial Sequence
  chemically synthesized
accccggttgaagtgcactgac

SEQ ID NO: 44325 - DNA, 22 bp, Artificial Sequence
  chemically synthesized
aagtgcactgacgtgattttgg

SEQ ID NO: 44326 - DNA, 22 bp, Artificial Sequence
  chemically synthesized
acgtgattttggctcactgcaa

SEQ ID NO: 44327 - DNA, 22 bp, Artificial Sequence
  chemically synthesized
tggctcactgcaacttccacct

SEQ ID NO: 44328 - DNA, 22 bp, Artificial Sequence
  chemically synthesized
ggctcactgcaacttccacctc

SEQ ID NO: 44329 - DNA, 22 bp, Artificial Sequence
  chemically synthesized
gctcactgcaacttccacctcc

SEQ ID NO: 44330 - DNA, 22 bp, Artificial Sequence
  chemically synthesized
actgcaacttccacctcctggg

SEQ ID NO: 44331 - DNA, 22 bp, Artificial Sequence
  chemically synthesized
caacttccacctcctgggttca

SEQ ID NO: 44332 - DNA, 22 bp, Artificial Sequence
  chemically synthesized
ccacctcctgggttcaagtgaa

SEQ ID NO: 44333 - DNA, 22 bp, Artificial Sequence
  chemically synthesized
cacctcctgggttcaagtgaat

SEQ ID NO: 44334 - DNA, 22 bp, Artificial Sequence
  chemically synthesized
ctgggttcaagtgaatactcca

SEQ ID NO: 44335 - DNA, 22 bp, Artificial Sequence
  chemically synthesized
ggttcaagtgaatactccagcc

SEQ ID NO: 44336 - DNA, 22 bp, Artificial Sequence
  chemically synthesized
aagtgaatactccagcctccct

SEQ ID NO: 44337 - DNA, 22 bp, Artificial Sequence
  chemically synthesized
cagcctccctagtagctgggat

SEQ ID NO: 44338 - DNA, 22 bp, Artificial Sequence
  chemically synthesized
cctagtagctgggattacaggt

SEQ ID NO: 44339 - DNA, 22 bp, Artificial Sequence
  chemically synthesized
gtagctgggattacaggtgccc

SEQ ID NO: 44340 - DNA, 22 bp, Artificial Sequence
  chemically synthesized
ggattacaggtgcccaccacca

SEQ ID NO: 44341 - DNA, 22 bp, Artificial Sequence
  chemically synthesized
caggtgcccaccaccacgcctg

SEQ ID NO: 44342 - DNA, 22 bp, Artificial Sequence
  chemically synthesized
gctaatttttgtatttttagta

SEQ ID NO: 44343 - DNA, 22 bp, Artificial Sequence
  chemically synthesized
atttttgtatttttagtagaga

SEQ ID NO: 44344 - DNA, 22 bp, Artificial Sequence
  chemically synthesized
ttgtatttttagtagagatggg

SEQ ID NO: 44345 - DNA, 22 bp, Artificial Sequence
  chemically synthesized
tgtatttttagtagagatgggg

SEQ ID NO: 44346 - DNA, 22 bp, Artificial Sequence
  chemically synthesized
gtatttttagtagagatggggt

SEQ ID NO: 44347 - DNA, 22 bp, Artificial Sequence
  chemically synthesized
tatttttagtagagatggggtt

SEQ ID NO: 44348 - DNA, 22 bp, Artificial Sequence
  chemically synthesized
ttagtagagatggggtttcacc

SEQ ID NO: 44349 - DNA, 22 bp, Artificial Sequence
  chemically synthesized
tagtagagatggggtttcacca

SEQ ID NO: 44350 - DNA, 22 bp, Artificial Sequence
  chemically synthesized
agtagagatggggtttcaccac

SEQ ID NO: 44351 - DNA, 22 bp, Artificial Sequence
  chemically synthesized
gtagagatggggtttcaccaca

SEQ ID NO: 44352 - DNA, 22 bp, Artificial Sequence
  chemically synthesized
caccacattggcctggctggtc

SEQ ID NO: 44353 - DNA, 22 bp, Artificial Sequence
  chemically synthesized
accacattggcctggctggtct

SEQ ID NO: 44354 - DNA, 22 bp, Artificial Sequence
  chemically synthesized
gcctggctggtctcaaactcct

SEQ ID NO: 44355 - DNA, 22 bp, Artificial Sequence
  chemically synthesized
gctggtctcaaactcctgacct

SEQ ID NO: 44356 - DNA, 22 bp, Artificial Sequence
  chemically synthesized
gtctcaaactcctgaccttgtg

SEQ ID NO: 44357 - DNA, 22 bp, Artificial Sequence
  chemically synthesized
aaactcctgaccttgtgatcca

SEQ ID NO: 44358 - DNA, 22 bp, Artificial Sequence
  chemically synthesized
ctgaccttgtgatccacctgtc

SEQ ID NO: 44359 - DNA, 22 bp, Artificial Sequence
  chemically synthesized
accttgtgatccacctgtcttg

SEQ ID NO: 44360 - DNA, 22 bp, Artificial Sequence
  chemically synthesized
gtgatccacctgtcttggcctc

SEQ ID NO: 44361 - DNA, 22 bp, Artificial Sequence
  chemically synthesized
tgatccacctgtcttggcctcc

SEQ ID NO: 44362 - DNA, 22 bp, Artificial Sequence
  chemically synthesized
tcttggcctcccaaagtgctgg

SEQ ID NO: 44363 - DNA, 22 bp, Artificial Sequence
  chemically synthesized
ggcctcccaaagtgctgggatt

SEQ ID NO: 44364 - DNA, 22 bp, Artificial Sequence
  chemically synthesized
gcctcccaaagtgctgggatta

SEQ ID NO: 44365 - DNA, 22 bp, Artificial Sequence
  chemically synthesized
ccaaagtgctgggattacagag

SEQ ID NO: 44366 - DNA, 22 bp, Artificial Sequence
  chemically synthesized
ggattacagagttgagccaccg

SEQ ID NO: 44367 - DNA, 22 bp, Artificial Sequence
  chemically synthesized
cagagttgagccaccgcactcg

SEQ ID NO: 44368 - DNA, 22 bp, Artificial Sequence
  chemically synthesized
agccaccgcactcgaccctatg

SEQ ID NO: 44369 - DNA, 22 bp, Artificial Sequence
  chemically synthesized
gaccctatgttttatttttaaa

SEQ ID NO: 44370 - DNA, 22 bp, Artificial Sequence
  chemically synthesized
tgttttatttttaaaaatattt

SEQ ID NO: 44371 - DNA, 22 bp, Artificial Sequence
  chemically synthesized
tatttttaaaaatatttattta

SEQ ID NO: 44372 - DNA, 22 bp, Artificial Sequence
  chemically synthesized
atttttaaaaatatttatttat

SEQ ID NO: 44373 - DNA, 22 bp, Artificial Sequence
  chemically synthesized
tttttaaaaatatttatttatt

SEQ ID NO: 44374 - DNA, 22 bp, Artificial Sequence
  chemically synthesized
ttaaaaatatttatttatttat

SEQ ID NO: 44375 - DNA, 22 bp, Artificial Sequence
  chemically synthesized
taaaaatatttatttatttatt

SEQ ID NO: 44376 - DNA, 22 bp, Artificial Sequence
  chemically synthesized
aaaaatatttatttatttattt

SEQ ID NO: 44377 - DNA, 22 bp, Artificial Sequence
  chemically synthesized
aaaatatttatttatttattta

SEQ ID NO: 44378 - DNA, 22 bp, Artificial Sequence
  chemically synthesized
atttatttatttaagccacaac

SEQ ID NO: 44379 - DNA, 22 bp, Artificial Sequence
  chemically synthesized
tttatttatttaagccacaact

SEQ ID NO: 44380 - DNA, 22 bp, Artificial Sequence
  chemically synthesized
atttatttaagccacaactact

SEQ ID NO: 44381 - DNA, 22 bp, Artificial Sequence
  chemically synthesized
tttatttaagccacaactacta

SEQ ID NO: 44382 - DNA, 22 bp, Artificial Sequence
  chemically synthesized
atttaagccacaactactagaa

SEQ ID NO: 44383 - DNA, 22 bp, Artificial Sequence
  chemically synthesized
tttaagccacaactactagaat

SEQ ID NO: 44384 - DNA, 22 bp, Artificial Sequence
  chemically synthesized
aagccacaactactagaatagg

SEQ ID NO: 44385 - DNA, 22 bp, Artificial Sequence
  chemically synthesized
agccacaactactagaatagga

SEQ ID NO: 44386 - DNA, 22 bp, Artificial Sequence
  chemically synthesized
ctagaataggaaggattgatat

SEQ ID NO: 44387 - DNA, 22 bp, Artificial Sequence
  chemically synthesized
gaataggaaggattgatatttt

SEQ ID NO: 44388 - DNA, 22 bp, Artificial Sequence
  chemically synthesized
atattttattaattttatttgg

SEQ ID NO: 44389 - DNA, 22 bp, Artificial Sequence
  chemically synthesized
tattaattttatttggtattta

SEQ ID NO: 44390 - DNA, 22 bp, Artificial Sequence
  chemically synthesized
attaattttatttggtatttat

SEQ ID NO: 44391 - DNA, 22 bp, Artificial Sequence
  chemically synthesized
ttaattttatttggtatttatt

SEQ ID NO: 44392 - DNA, 22 bp, Artificial Sequence
  chemically synthesized
attttatttggtatttattatt

SEQ ID NO: 44393 - DNA, 22 bp, Artificial Sequence
  chemically synthesized
tatttggtatttattatttttt

SEQ ID NO: 44394 - DNA, 22 bp, Artificial Sequence
  chemically synthesized
atttggtatttattattttttt

SEQ ID NO: 44395 - DNA, 22 bp, Artificial Sequence
  chemically synthesized
tttggtatttattatttttttt

SEQ ID NO: 44396 - DNA, 22 bp, Artificial Sequence
  chemically synthesized
ggtatttattatttttttttct

SEQ ID NO: 44397 - DNA, 22 bp, Artificial Sequence
  chemically synthesized
gtatttattatttttttttctt

SEQ ID NO: 44398 - DNA, 22 bp, Artificial Sequence
  chemically synthesized
attatttttttttctttcctga

SEQ ID NO: 44399 - DNA, 22 bp, Artificial Sequence
  chemically synthesized
ttatttttttttctttcctgag

SEQ ID NO: 44400 - DNA, 22 bp, Artificial Sequence
  chemically synthesized
tttttttttctttcctgagaca

SEQ ID NO: 44401 - DNA, 22 bp, Artificial Sequence
  chemically synthesized
ttttttctttcctgagacattc

SEQ ID NO: 44402 - DNA, 22 bp, Artificial Sequence
  chemically synthesized
tttttctttcctgagacattct

SEQ ID NO: 44403 - DNA, 22 bp, Artificial Sequence
  chemically synthesized
ttttctttcctgagacattctt

SEQ ID NO: 44404 - DNA, 22 bp, Artificial Sequence
  chemically synthesized
tttctttcctgagacattcttg

SEQ ID NO: 44405 - DNA, 22 bp, Artificial Sequence
  chemically synthesized
ttctttcctgagacattcttgc

SEQ ID NO: 44406 - DNA, 22 bp, Artificial Sequence
  chemically synthesized
tctttcctgagacattcttgct

SEQ ID NO: 44407 - DNA, 22 bp, Artificial Sequence
  chemically synthesized
ctttcctgagacattcttgctc

SEQ ID NO: 44408 - DNA, 22 bp, Artificial Sequence
  chemically synthesized
tttcctgagacattcttgctct

SEQ ID NO: 44409 - DNA, 22 bp, Artificial Sequence
  chemically synthesized
tcctgagacattcttgctctgt

SEQ ID NO: 44410 - DNA, 22 bp, Artificial Sequence
  chemically synthesized
cctgagacattcttgctctgtc

SEQ ID NO: 44411 - DNA, 22 bp, Artificial Sequence
  chemically synthesized
ctgagacattcttgctctgtca

SEQ ID NO: 44412 - DNA, 22 bp, Artificial Sequence
  chemically synthesized
agacattcttgctctgtcaccc

SEQ ID NO: 44413 - DNA, 22 bp, Artificial Sequence
  chemically synthesized
ttgctctgtcacccaggctgga

SEQ ID NO: 44414 - DNA, 22 bp, Artificial Sequence
  chemically synthesized
gctctgtcacccaggctggagt

SEQ ID NO: 44415 - DNA, 22 bp, Artificial Sequence
  chemically synthesized
ctctgtcacccaggctggagtg

SEQ ID NO: 44416 - DNA, 22 bp, Artificial Sequence
  chemically synthesized
tgtcacccaggctggagtgcag

SEQ ID NO: 44417 - DNA, 22 bp, Artificial Sequence
  chemically synthesized
tcacccaggctggagtgcagtg

SEQ ID NO: 44418 - DNA, 22 bp, Artificial Sequence
  chemically synthesized
gagtgcagtggcacattcttgg

SEQ ID NO: 44419 - DNA, 22 bp, Artificial Sequence
  chemically synthesized
ttggctcactgcaacctccatc

SEQ ID NO: 44420 - DNA, 22 bp, Artificial Sequence
  chemically synthesized
ggctcactgcaacctccatctc

SEQ ID NO: 44421 - DNA, 22 bp, Artificial Sequence
  chemically synthesized
gctcactgcaacctccatctcc

SEQ ID NO: 44422 - DNA, 22 bp, Artificial Sequence
  chemically synthesized
actgcaacctccatctcctgtg

SEQ ID NO: 44423 - DNA, 22 bp, Artificial Sequence
  chemically synthesized
caacctccatctcctgtgttca

SEQ ID NO: 44424 - DNA, 22 bp, Artificial Sequence
  chemically synthesized
catctcctgtgttcaagcaatt

SEQ ID NO: 44425 - DNA, 22 bp, Artificial Sequence
  chemically synthesized
ctgtgttcaagcaattctagtg

SEQ ID NO: 44426 - DNA, 22 bp, Artificial Sequence
  chemically synthesized
tgttcaagcaattctagtgcct

SEQ ID NO: 44427 - DNA, 22 bp, Artificial Sequence
  chemically synthesized
aagcaattctagtgcctcagcc

SEQ ID NO: 44428 - DNA, 22 bp, Artificial Sequence
  chemically synthesized
tagtgcctcagcctacttagta

SEQ ID NO: 44429 - DNA, 22 bp, Artificial Sequence
  chemically synthesized
gtgcctcagcctacttagtagc

SEQ ID NO: 44430 - DNA, 22 bp, Artificial Sequence
  chemically synthesized
agcctacttagtagctgggatg

SEQ ID NO: 44431 - DNA, 22 bp, Artificial Sequence
  chemically synthesized
cttagtagctgggatgactggc

SEQ ID NO: 44432 - DNA, 22 bp, Artificial Sequence
  chemically synthesized
agtagctgggatgactggcatg

SEQ ID NO: 44433 - DNA, 22 bp, Artificial Sequence
  chemically synthesized
gtagctgggatgactggcatgt

SEQ ID NO: 44434 - DNA, 22 bp, Artificial Sequence
  chemically synthesized
ggatgactggcatgtgcctcca

SEQ ID NO: 44435 - DNA, 22 bp, Artificial Sequence
  chemically synthesized
gcatgtgcctccacacccagct

SEQ ID NO: 44436 - DNA, 22 bp, Artificial Sequence
  chemically synthesized
cacacccagctaatttttgtat

SEQ ID NO: 44437 - DNA, 22 bp, Artificial Sequence
  chemically synthesized
atttttgtattttttgtagaga

SEQ ID NO: 44438 - DNA, 22 bp, Artificial Sequence
  chemically synthesized
ttgtattttttgtagagacagg

SEQ ID NO: 44439 - DNA, 22 bp, Artificial Sequence
  chemically synthesized
tgtattttttgtagagacaggg

SEQ ID NO: 44440 - DNA, 22 bp, Artificial Sequence
  chemically synthesized
gtattttttgtagagacagggt

SEQ ID NO: 44441 - DNA, 22 bp, Artificial Sequence
  chemically synthesized
tattttttgtagagacagggtt

SEQ ID NO: 44442 - DNA, 22 bp, Artificial Sequence
  chemically synthesized
tttgtagagacagggttttggc

SEQ ID NO: 44443 - DNA, 22 bp, Artificial Sequence
  chemically synthesized
ttgtagagacagggttttggca

SEQ ID NO: 44444 - DNA, 22 bp, Artificial Sequence
  chemically synthesized
tgtagagacagggttttggcat

SEQ ID NO: 44445 - DNA, 22 bp, Artificial Sequence
  chemically synthesized
gtagagacagggttttggcatg

SEQ ID NO: 44446 - DNA, 22 bp, Artificial Sequence
  chemically synthesized
tagagacagggttttggcatgt

SEQ ID NO: 44447 - DNA, 22 bp, Artificial Sequence
  chemically synthesized
tggcatgttgcccaggcttgtc

SEQ ID NO: 44448 - DNA, 22 bp, Artificial Sequence
  chemically synthesized
ggcatgttgcccaggcttgtct

SEQ ID NO: 44449 - DNA, 22 bp, Artificial Sequence
  chemically synthesized
gcatgttgcccaggcttgtctc

SEQ ID NO: 44450 - DNA, 22 bp, Artificial Sequence
  chemically synthesized
cccaggcttgtctcaaactcct

SEQ ID NO: 44451 - DNA, 22 bp, Artificial Sequence
  chemically synthesized
gtctcaaactcctggcctcagg

SEQ ID NO: 44452 - DNA, 22 bp, Artificial Sequence
  chemically synthesized
tctcaaactcctggcctcaggt

SEQ ID NO: 44453 - DNA, 22 bp, Artificial Sequence
  chemically synthesized
aaactcctggcctcaggtgatc

SEQ ID NO: 44454 - DNA, 22 bp, Artificial Sequence
  chemically synthesized
ctggcctcaggtgatccatctg

SEQ ID NO: 44455 - DNA, 22 bp, Artificial Sequence
  chemically synthesized
gcctcaggtgatccatctgccg

SEQ ID NO: 44456 - DNA, 22 bp, Artificial Sequence
  chemically synthesized
aggtgatccatctgccgtggcc

SEQ ID NO: 44457 - DNA, 22 bp, Artificial Sequence
  chemically synthesized
ccgtggcctcccaaaatgctgg

SEQ ID NO: 44458 - DNA, 22 bp, Artificial Sequence
  chemically synthesized
ccaaaatgctgggattataggc

SEQ ID NO: 44459 - DNA, 22 bp, Artificial Sequence
  chemically synthesized
ggattataggcatgagccacca

SEQ ID NO: 44460 - DNA, 22 bp, Artificial Sequence
  chemically synthesized
taggcatgagccaccaccccct

SEQ ID NO: 44461 - DNA, 22 bp, Artificial Sequence
  chemically synthesized
ctggaaggattgatatcttata

SEQ ID NO: 44462 - DNA, 22 bp, Artificial Sequence
  chemically synthesized
gaaggattgatatcttataaca

SEQ ID NO: 44463 - DNA, 22 bp, Artificial Sequence
  chemically synthesized
atatcttataacataatttata

SEQ ID NO: 44464 - DNA, 22 bp, Artificial Sequence
  chemically synthesized
ataacataatttataattacag

SEQ ID NO: 44465 - DNA, 22 bp, Artificial Sequence
  chemically synthesized
taacataatttataattacaga

SEQ ID NO: 44466 - DNA, 22 bp, Artificial Sequence
  chemically synthesized
ataattacagaaaacatgtgag

SEQ ID NO: 44467 - DNA, 22 bp, Artificial Sequence
  chemically synthesized
taattacagaaaacatgtgagt

SEQ ID NO: 44468 - DNA, 22 bp, Artificial Sequence
  chemically synthesized
cagaaaacatgtgagttcacta

SEQ ID NO: 44469 - DNA, 22 bp, Artificial Sequence
  chemically synthesized
actaggaataaataaattttga

SEQ ID NO: 44470 - DNA, 22 bp, Artificial Sequence
  chemically synthesized
ggaataaataaattttgaagat

SEQ ID NO: 44471 - DNA, 22 bp, Artificial Sequence
  chemically synthesized
tgaagataataaaagattttca

SEQ ID NO: 44472 - DNA, 22 bp, Artificial Sequence
  chemically synthesized
gaagataataaaagattttcac

SEQ ID NO: 44473 - DNA, 22 bp, Artificial Sequence
  chemically synthesized
aagataataaaagattttcact

SEQ ID NO: 44474 - DNA, 22 bp, Artificial Sequence
  chemically synthesized
tcacttatgttgtcatttcggc

SEQ ID NO: 44475 - DNA, 22 bp, Artificial Sequence
  chemically synthesized
cacttatgttgtcatttcggca

SEQ ID NO: 44476 - DNA, 22 bp, Artificial Sequence
  chemically synthesized
acttatgttgtcatttcggcac

SEQ ID NO: 44477 - DNA, 22 bp, Artificial Sequence
  chemically synthesized
atgttgtcatttcggcacagtt

SEQ ID NO: 44478 - DNA, 22 bp, Artificial Sequence
  chemically synthesized
tgttgtcatttcggcacagttt

SEQ ID NO: 44479 - DNA, 22 bp, Artificial Sequence
  chemically synthesized
tcatttcggcacagtttggtat

SEQ ID NO: 44480 - DNA, 22 bp, Artificial Sequence
  chemically synthesized
cggcacagtttggtataggatg

SEQ ID NO: 44481 - DNA, 22 bp, Artificial Sequence
  chemically synthesized
ggcacagtttggtataggatgt

SEQ ID NO: 44482 - DNA, 22 bp, Artificial Sequence
  chemically synthesized
ggtataggatgtggagatgtta

SEQ ID NO: 44483 - DNA, 22 bp, Artificial Sequence
  chemically synthesized
gtataggatgtggagatgttaa

SEQ ID NO: 44484 - DNA, 22 bp, Artificial Sequence
  chemically synthesized
acatttatacctagcttgctcg

SEQ ID NO: 44485 - DNA, 22 bp, Artificial Sequence
  chemically synthesized
atacctagcttgctcgtaaact

SEQ ID NO: 44486 - DNA, 22 bp, Artificial Sequence
  chemically synthesized
tacctagcttgctcgtaaacta

SEQ ID NO: 44487 - DNA, 22 bp, Artificial Sequence
  chemically synthesized
gcttgctcgtaaactaagacct

SEQ ID NO: 44488 - DNA, 22 bp, Artificial Sequence
  chemically synthesized
gctcgtaaactaagacctgaaa

SEQ ID NO: 44489 - DNA, 22 bp, Artificial Sequence
  chemically synthesized
ctcgtaaactaagacctgaaag

SEQ ID NO: 44490 - DNA, 22 bp, Artificial Sequence
  chemically synthesized
gtaaactaagacctgaaagggt

SEQ ID NO: 44491 - DNA, 22 bp, Artificial Sequence
  chemically synthesized
agacctgaaagggttgtgtcta

SEQ ID NO: 44492 - DNA, 22 bp, Artificial Sequence
  chemically synthesized
aaagggttgtgtctatcagctg

SEQ ID NO: 44493 - DNA, 22 bp, Artificial Sequence
  chemically synthesized
tgtctatcagctgcacccctgg

SEQ ID NO: 44494 - DNA, 22 bp, Artificial Sequence
  chemically synthesized
tcagctgcacccctgggtagcg

SEQ ID NO: 44495 - DNA, 22 bp, Artificial Sequence
  chemically synthesized
cacccctgggtagcgacacaac

SEQ ID NO: 44496 - DNA, 22 bp, Artificial Sequence
  chemically synthesized
ggtagcgacacaacctcgggaa

SEQ ID NO: 44497 - DNA, 22 bp, Artificial Sequence
  chemically synthesized
gggaaggcctcagccccctcct

SEQ ID NO: 44498 - DNA, 22 bp, Artificial Sequence
  chemically synthesized
agccccctcctcgtacagcact

SEQ ID NO: 44499 - DNA, 22 bp, Artificial Sequence
  chemically synthesized
ctcgtacagcactgcctgttgg

SEQ ID NO: 44500 - DNA, 22 bp, Artificial Sequence
  chemically synthesized
gtacagcactgcctgttggaaa

SEQ ID NO: 44501 - DNA, 22 bp, Artificial Sequence
  chemically synthesized
cctgttggaaagcttgagggag

SEQ ID NO: 44502 - DNA, 22 bp, Artificial Sequence
  chemically synthesized
ttggaaagcttgagggaggcta

SEQ ID NO: 44503 - DNA, 22 bp, Artificial Sequence
  chemically synthesized
gaaagcttgagggaggctatgg

SEQ ID NO: 44504 - DNA, 22 bp, Artificial Sequence
  chemically synthesized
gagggaggctatggatgtgcag

SEQ ID NO: 44505 - DNA, 22 bp, Artificial Sequence
  chemically synthesized
agggaggctatggatgtgcagc

SEQ ID NO: 44506 - DNA, 22 bp, Artificial Sequence
  chemically synthesized
tggatgtgcagcacttggcaga

SEQ ID NO: 44507 - DNA, 22 bp, Artificial Sequence
  chemically synthesized
ggcagagggtctggtcatggaa

SEQ ID NO: 44508 - DNA, 22 bp, Artificial Sequence
  chemically synthesized
gcagagggtctggtcatggaag

SEQ ID NO: 44509 - DNA, 22 bp, Artificial Sequence
  chemically synthesized
gtcatggaagttaccagcaaat

SEQ ID NO: 44510 - DNA, 22 bp, Artificial Sequence
  chemically synthesized
ccagcaaatatgagctactttt

SEQ ID NO: 44511 - DNA, 22 bp, Artificial Sequence
  chemically synthesized
cttttatgattttattttatcc

SEQ ID NO: 44512 - DNA, 22 bp, Artificial Sequence
  chemically synthesized
ttatgattttattttatccaaa

SEQ ID NO: 44513 - DNA, 22 bp, Artificial Sequence
  chemically synthesized
tatgattttattttatccaaaa

SEQ ID NO: 44514 - DNA, 22 bp, Artificial Sequence
  chemically synthesized
atgattttattttatccaaaag

SEQ ID NO: 44515 - DNA, 22 bp, Artificial Sequence
  chemically synthesized
tgattttattttatccaaaaga

SEQ ID NO: 44516 - DNA, 22 bp, Artificial Sequence
  chemically synthesized
tattttatccaaaagaaagaga

SEQ ID NO: 44517 - DNA, 22 bp, Artificial Sequence
  chemically synthesized
attttatccaaaagaaagagaa

SEQ ID NO: 44518 - DNA, 22 bp, Artificial Sequence
  chemically synthesized
ttttatccaaaagaaagagaat

SEQ ID NO: 44519 - DNA, 22 bp, Artificial Sequence
  chemically synthesized
tatccaaaagaaagagaatgaa

SEQ ID NO: 44520 - DNA, 22 bp, Artificial Sequence
  chemically synthesized
atccaaaagaaagagaatgaaa

SEQ ID NO: 44521 - DNA, 22 bp, Artificial Sequence
  chemically synthesized
tccaaaagaaagagaatgaaag

SEQ ID NO: 44522 - DNA, 22 bp, Artificial Sequence
  chemically synthesized
atcaggaaagatgaaggtctag

SEQ ID NO: 44523 - DNA, 22 bp, Artificial Sequence
  chemically synthesized
ggggtgagggaaggagtaagga

SEQ ID NO: 44524 - DNA, 22 bp, Artificial Sequence
  chemically synthesized
aggggggaaatggctttcacca

SEQ ID NO: 44525 - DNA, 22 bp, Artificial Sequence
  chemically synthesized
tcaccacttcccagcatctatt

SEQ ID NO: 44526 - DNA, 22 bp, Artificial Sequence
  chemically synthesized
caccacttcccagcatctattg

SEQ ID NO: 44527 - DNA, 22 bp, Artificial Sequence
  chemically synthesized
accacttcccagcatctattga

SEQ ID NO: 44528 - DNA, 22 bp, Artificial Sequence
  chemically synthesized
cccagcatctattgacattgca

SEQ ID NO: 44529 - DNA, 22 bp, Artificial Sequence
  chemically synthesized
ccagcatctattgacattgcac

SEQ ID NO: 44530 - DNA, 22 bp, Artificial Sequence
  chemically synthesized
ttgacattgcactctcaaatat

SEQ ID NO: 44531 - DNA, 22 bp, Artificial Sequence
  chemically synthesized
acattgcactctcaaatatttt

SEQ ID NO: 44532 - DNA, 22 bp, Artificial Sequence
  chemically synthesized
cactctcaaatattttataaga

SEQ ID NO: 44533 - DNA, 22 bp, Artificial Sequence
  chemically synthesized
tcaaatattttataagactcta

SEQ ID NO: 44534 - DNA, 22 bp, Artificial Sequence
  chemically synthesized
aaatattttataagactctata

SEQ ID NO: 44535 - DNA, 22 bp, Artificial Sequence
  chemically synthesized
tataagactctatattcaaggt

SEQ ID NO: 44536 - DNA, 22 bp, Artificial Sequence
  chemically synthesized
ataagactctatattcaaggta

SEQ ID NO: 44537 - DNA, 22 bp, Artificial Sequence
  chemically synthesized
taagactctatattcaaggtaa

SEQ ID NO: 44538 - DNA, 22 bp, Artificial Sequence
  chemically synthesized
tatattcaaggtaatgtttgaa

SEQ ID NO: 44539 - DNA, 22 bp, Artificial Sequence
  chemically synthesized
tattcaaggtaatgtttgaacc

SEQ ID NO: 44540 - DNA, 22 bp, Artificial Sequence
  chemically synthesized
aaggtaatgtttgaaccctgct

SEQ ID NO: 44541 - DNA, 22 bp, Artificial Sequence
  chemically synthesized
gaaccctgctgagccagtggca

SEQ ID NO: 44542 - DNA, 22 bp, Artificial Sequence
  chemically synthesized
aaccctgctgagccagtggcat

SEQ ID NO: 44543 - DNA, 22 bp, Artificial Sequence
  chemically synthesized
ctgagccagtggcatgggtctc

SEQ ID NO: 44544 - DNA, 22 bp, Artificial Sequence
  chemically synthesized
agccagtggcatgggtctctga

SEQ ID NO: 44545 - DNA, 22 bp, Artificial Sequence
  chemically synthesized
tgagagaatcattaacttaatt

SEQ ID NO: 44546 - DNA, 22 bp, Artificial Sequence
  chemically synthesized
agagaatcattaacttaatttg

SEQ ID NO: 44547 - DNA, 22 bp, Artificial Sequence
  chemically synthesized
acttaatttgactatctggttt

SEQ ID NO: 44548 - DNA, 22 bp, Artificial Sequence
  chemically synthesized
aatttgactatctggtttgtgg

SEQ ID NO: 44549 - DNA, 22 bp, Artificial Sequence
  chemically synthesized
atttgactatctggtttgtggg

SEQ ID NO: 44550 - DNA, 22 bp, Artificial Sequence
  chemically synthesized
gactatctggtttgtgggtgcg

SEQ ID NO: 44551 - DNA, 22 bp, Artificial Sequence
  chemically synthesized
actatctggtttgtgggtgcgt

SEQ ID NO: 44552 - DNA, 22 bp, Artificial Sequence
  chemically synthesized
tctggtttgtgggtgcgtttac

SEQ ID NO: 44553 - DNA, 22 bp, Artificial Sequence
  chemically synthesized
gtttgtgggtgcgtttactctc

SEQ ID NO: 44554 - DNA, 22 bp, Artificial Sequence
  chemically synthesized
gtgggtgcgtttactctcatgt

SEQ ID NO: 44555 - DNA, 22 bp, Artificial Sequence
  chemically synthesized
tgggtgcgtttactctcatgta

SEQ ID NO: 44556 - DNA, 22 bp, Artificial Sequence
  chemically synthesized
actctcatgtaagtcaacaatg

SEQ ID NO: 44557 - DNA, 22 bp, Artificial Sequence
  chemically synthesized
ctctcatgtaagtcaacaatgt

SEQ ID NO: 44558 - DNA, 22 bp, Artificial Sequence
  chemically synthesized
tcatgtaagtcaacaatgtcct

SEQ ID NO: 44559 - DNA, 22 bp, Artificial Sequence
  chemically synthesized
atgtaagtcaacaatgtcctgg

SEQ ID NO: 44560 - DNA, 22 bp, Artificial Sequence
  chemically synthesized
ggattgggacacactttctggg

SEQ ID NO: 44561 - DNA, 22 bp, Artificial Sequence
  chemically synthesized
ggacacactttctgggcactgc

SEQ ID NO: 44562 - DNA, 22 bp, Artificial Sequence
  chemically synthesized
tctgggcactgctggccagtcc

SEQ ID NO: 44563 - DNA, 22 bp, Artificial Sequence
  chemically synthesized
ctgggcactgctggccagtccc

SEQ ID NO: 44564 - DNA, 22 bp, Artificial Sequence
  chemically synthesized
tgggcactgctggccagtccca

SEQ ID NO: 44565 - DNA, 22 bp, Artificial Sequence
  chemically synthesized
ggcactgctggccagtcccaaa

SEQ ID NO: 44566 - DNA, 22 bp, Artificial Sequence
  chemically synthesized
ctggccagtcccaaaatggaac

SEQ ID NO: 44567 - DNA, 22 bp, Artificial Sequence
  chemically synthesized
gccagtcccaaaatggaacata

SEQ ID NO: 44568 - DNA, 22 bp, Artificial Sequence
  chemically synthesized
ttctacttcttttatttctgaa

SEQ ID NO: 44569 - DNA, 22 bp, Artificial Sequence
  chemically synthesized
ctacttcttttatttctgaaat

SEQ ID NO: 44570 - DNA, 22 bp, Artificial Sequence
  chemically synthesized
tacttcttttatttctgaaatc

SEQ ID NO: 44571 - DNA, 22 bp, Artificial Sequence
  chemically synthesized
cttcttttatttctgaaatcag

SEQ ID NO: 44572 - DNA, 22 bp, Artificial Sequence
  chemically synthesized
cttttatttctgaaatcaggta

SEQ ID NO: 44573 - DNA, 22 bp, Artificial Sequence
  chemically synthesized
ttttatttctgaaatcaggtaa

SEQ ID NO: 44574 - DNA, 22 bp, Artificial Sequence
  chemically synthesized
ttatttctgaaatcaggtaaga

SEQ ID NO: 44575 - DNA, 22 bp, Artificial Sequence
  chemically synthesized
tatttctgaaatcaggtaagac

SEQ ID NO: 44576 - DNA, 22 bp, Artificial Sequence
  chemically synthesized
atttctgaaatcaggtaagaca

SEQ ID NO: 44577 - DNA, 22 bp, Artificial Sequence
  chemically synthesized
tttctgaaatcaggtaagacat

SEQ ID NO: 44578 - DNA, 22 bp, Artificial Sequence
  chemically synthesized
ctgaaatcaggtaagacatagt

SEQ ID NO: 44579 - DNA, 22 bp, Artificial Sequence
  chemically synthesized
tgaaatcaggtaagacatagtt

SEQ ID NO: 44580 - DNA, 22 bp, Artificial Sequence
  chemically synthesized
aaatcaggtaagacatagtttt

SEQ ID NO: 44581 - DNA, 22 bp, Artificial Sequence
  chemically synthesized
ttttaaattataagaattattt

SEQ ID NO: 44582 - DNA, 22 bp, Artificial Sequence
  chemically synthesized
tttaaattataagaattatttt

SEQ ID NO: 44583 - DNA, 22 bp, Artificial Sequence
  chemically synthesized
ttaaattataagaattattttt

SEQ ID NO: 44584 - DNA, 22 bp, Artificial Sequence
  chemically synthesized
taaattataagaattatttttt

SEQ ID NO: 44585 - DNA, 22 bp, Artificial Sequence
  chemically synthesized
aaattataagaattattttttc

SEQ ID NO: 44586 - DNA, 22 bp, Artificial Sequence
  chemically synthesized
aattataagaattattttttct

SEQ ID NO: 44587 - DNA, 22 bp, Artificial Sequence
  chemically synthesized
taagaattattttttctcccac

SEQ ID NO: 44588 - DNA, 22 bp, Artificial Sequence
  chemically synthesized
ttttttctcccacaatgtagta

SEQ ID NO: 44589 - DNA, 22 bp, Artificial Sequence
  chemically synthesized
tttctcccacaatgtagtaaaa

SEQ ID NO: 44590 - DNA, 22 bp, Artificial Sequence
  chemically synthesized
ttctcccacaatgtagtaaaaa

SEQ ID NO: 44591 - DNA, 22 bp, Artificial Sequence
  chemically synthesized
tctcccacaatgtagtaaaaat

SEQ ID NO: 44592 - DNA, 22 bp, Artificial Sequence
  chemically synthesized
ctcccacaatgtagtaaaaata

SEQ ID NO: 44593 - DNA, 22 bp, Artificial Sequence
  chemically synthesized
tcccacaatgtagtaaaaatac

SEQ ID NO: 44594 - DNA, 22 bp, Artificial Sequence
  chemically synthesized
ccacaatgtagtaaaaatacat

SEQ ID NO: 44595 - DNA, 22 bp, Artificial Sequence
  chemically synthesized
tatgtgcaattcatttaatttt

SEQ ID NO: 44596 - DNA, 22 bp, Artificial Sequence
  chemically synthesized
atgtgcaattcatttaattttt

SEQ ID NO: 44597 - DNA, 22 bp, Artificial Sequence
  chemically synthesized
tgtgcaattcatttaatttttg

SEQ ID NO: 44598 - DNA, 22 bp, Artificial Sequence
  chemically synthesized
atttaatttttgattcatgaaa

SEQ ID NO: 44599 - DNA, 22 bp, Artificial Sequence
  chemically synthesized
aatttttgattcatgaaattcc

SEQ ID NO: 44600 - DNA, 22 bp, Artificial Sequence
  chemically synthesized
atttttgattcatgaaattccc

SEQ ID NO: 44601 - DNA, 22 bp, Artificial Sequence
  chemically synthesized
ttgattcatgaaattcccagtt

SEQ ID NO: 44602 - DNA, 22 bp, Artificial Sequence
  chemically synthesized
tgattcatgaaattcccagttc

SEQ ID NO: 44603 - DNA, 22 bp, Artificial Sequence
  chemically synthesized
gattcatgaaattcccagttca

SEQ ID NO: 44604 - DNA, 22 bp, Artificial Sequence
  chemically synthesized
attcatgaaattcccagttcaa

SEQ ID NO: 44605 - DNA, 22 bp, Artificial Sequence
  chemically synthesized
atgaaattcccagttcaaaatc

SEQ ID NO: 44606 - DNA, 22 bp, Artificial Sequence
  chemically synthesized
ccagttcaaaatcttgtatatg

SEQ ID NO: 44607 - DNA, 22 bp, Artificial Sequence
  chemically synthesized
aaaatcttgtatatgattgaaa

SEQ ID NO: 44608 - DNA, 22 bp, Artificial Sequence
  chemically synthesized
gtatatgattgaaaaattctta

SEQ ID NO: 44609 - DNA, 22 bp, Artificial Sequence
  chemically synthesized
tatatgattgaaaaattcttaa

SEQ ID NO: 44610 - DNA, 22 bp, Artificial Sequence
  chemically synthesized
aaaaattcttaaaaaaataagt

SEQ ID NO: 44611 - DNA, 22 bp, Artificial Sequence
  chemically synthesized
ttaaaaaaataagtttaatttc

SEQ ID NO: 44612 - DNA, 22 bp, Artificial Sequence
  chemically synthesized
aaaaaaataagtttaatttccc

SEQ ID NO: 44613 - DNA, 22 bp, Artificial Sequence
  chemically synthesized
aaaaaataagtttaatttcccc

SEQ ID NO: 44614 - DNA, 22 bp, Artificial Sequence
  chemically synthesized
aatttccccgtgaagactgtca

SEQ ID NO: 44615 - DNA, 22 bp, Artificial Sequence
  chemically synthesized
atttccccgtgaagactgtcac

SEQ ID NO: 44616 - DNA, 22 bp, Artificial Sequence
  chemically synthesized
ccccgtgaagactgtcacggtg

SEQ ID NO: 44617 - DNA, 22 bp, Artificial Sequence
  chemically synthesized
cccgtgaagactgtcacggtgc

SEQ ID NO: 44618 - DNA, 22 bp, Artificial Sequence
  chemically synthesized
tcacggtgctggaatgaatggg

SEQ ID NO: 44619 - DNA, 22 bp, Artificial Sequence
  chemically synthesized
gaatgaatgggcagaaaaaata

SEQ ID NO: 44620 - DNA, 22 bp, Artificial Sequence
  chemically synthesized
atttttctaatctaaaagagtg

SEQ ID NO: 44621 - DNA, 22 bp, Artificial Sequence
  chemically synthesized
ttctaatctaaaagagtgtgcc

SEQ ID NO: 44622 - DNA, 22 bp, Artificial Sequence
  chemically synthesized
tctaatctaaaagagtgtgcct

SEQ ID NO: 44623 - DNA, 22 bp, Artificial Sequence
  chemically synthesized
ctaatctaaaagagtgtgccta

SEQ ID NO: 44624 - DNA, 22 bp, Artificial Sequence
  chemically synthesized
taatctaaaagagtgtgcctac

SEQ ID NO: 44625 - DNA, 22 bp, Artificial Sequence
  chemically synthesized
atctaaaagagtgtgcctacat

SEQ ID NO: 44626 - DNA, 22 bp, Artificial Sequence
  chemically synthesized
aaagagtgtgcctacatgatgg

SEQ ID NO: 44627 - DNA, 22 bp, Artificial Sequence
  chemically synthesized
catgatggccagtctggctgaa

SEQ ID NO: 44628 - DNA, 22 bp, Artificial Sequence
  chemically synthesized
gctgaaaaataaatagccattg

SEQ ID NO: 44629 - DNA, 22 bp, Artificial Sequence
  chemically synthesized
aaaaataaatagccattgtagc

SEQ ID NO: 44630 - DNA, 22 bp, Artificial Sequence
  chemically synthesized
tagctaactatgcaaaggatgg

SEQ ID NO: 44631 - DNA, 22 bp, Artificial Sequence
  chemically synthesized
actatgcaaaggatggctaagc

SEQ ID NO: 44632 - DNA, 22 bp, Artificial Sequence
  chemically synthesized
tgcaaaggatggctaagctctt

SEQ ID NO: 44633 - DNA, 22 bp, Artificial Sequence
  chemically synthesized
agctcttcgcttggttctcagt

SEQ ID NO: 44634 - DNA, 22 bp, Artificial Sequence
  chemically synthesized
ttcgcttggttctcagtttcat

SEQ ID NO: 44635 - DNA, 22 bp, Artificial Sequence
  chemically synthesized
cgcttggttctcagtttcatta

SEQ ID NO: 44636 - DNA, 22 bp, Artificial Sequence
  chemically synthesized
gcttggttctcagtttcattaa

SEQ ID NO: 44637 - DNA, 22 bp, Artificial Sequence
  chemically synthesized
ggttctcagtttcattaattta

SEQ ID NO: 44638 - DNA, 22 bp, Artificial Sequence
  chemically synthesized
gttctcagtttcattaatttat

SEQ ID NO: 44639 - DNA, 22 bp, Artificial Sequence
  chemically synthesized
tcagtttcattaatttatatca

SEQ ID NO: 44640 - DNA, 22 bp, Artificial Sequence
  chemically synthesized
agtttcattaatttatatcatc

SEQ ID NO: 44641 - DNA, 22 bp, Artificial Sequence
  chemically synthesized
cattaatttatatcatctctgt

SEQ ID NO: 44642 - DNA, 22 bp, Artificial Sequence
  chemically synthesized
attaatttatatcatctctgtt

SEQ ID NO: 44643 - DNA, 22 bp, Artificial Sequence
  chemically synthesized
atttatatcatctctgttcagg

SEQ ID NO: 44644 - DNA, 22 bp, Artificial Sequence
  chemically synthesized
atatcatctctgttcaggtgcc

SEQ ID NO: 44645 - DNA, 22 bp, Artificial Sequence
  chemically synthesized
tatcatctctgttcaggtgcca

SEQ ID NO: 44646 - DNA, 22 bp, Artificial Sequence
  chemically synthesized
tgttcaggtgccatgctcccct

SEQ ID NO: 44647 - DNA, 22 bp, Artificial Sequence
  chemically synthesized
ttcaggtgccatgctcccctca

SEQ ID NO: 44648 - DNA, 22 bp, Artificial Sequence
  chemically synthesized
aggtgccatgctcccctcacta

SEQ ID NO: 44649 - DNA, 22 bp, Artificial Sequence
  chemically synthesized
ccctcactagcaagttgaaaca

SEQ ID NO: 44650 - DNA, 22 bp, Artificial Sequence
  chemically synthesized
actagcaagttgaaacaatgaa

SEQ ID NO: 44651 - DNA, 22 bp, Artificial Sequence
  chemically synthesized
gcaagttgaaacaatgaaataa

SEQ ID NO: 44652 - DNA, 22 bp, Artificial Sequence
  chemically synthesized
aaacaatgaaataactctttga

SEQ ID NO: 44653 - DNA, 22 bp, Artificial Sequence
  chemically synthesized
tttgaatatgtttggttccttg

SEQ ID NO: 44654 - DNA, 22 bp, Artificial Sequence
  chemically synthesized
tgaatatgtttggttccttgac

SEQ ID NO: 44655 - DNA, 22 bp, Artificial Sequence
  chemically synthesized
gaatatgtttggttccttgacc

SEQ ID NO: 44656 - DNA, 22 bp, Artificial Sequence
  chemically synthesized
aatatgtttggttccttgacct

SEQ ID NO: 44657 - DNA, 22 bp, Artificial Sequence
  chemically synthesized
ggttccttgacctgttcatgga

SEQ ID NO: 44658 - DNA, 22 bp, Artificial Sequence
  chemically synthesized
gttccttgacctgttcatggag

SEQ ID NO: 44659 - DNA, 22 bp, Artificial Sequence
  chemically synthesized
cttgacctgttcatggagtggg

SEQ ID NO: 44660 - DNA, 22 bp, Artificial Sequence
  chemically synthesized
gacctgttcatggagtgggact

SEQ ID NO: 44661 - DNA, 22 bp, Artificial Sequence
  chemically synthesized
acctgttcatggagtgggactc

SEQ ID NO: 44662 - DNA, 22 bp, Artificial Sequence
  chemically synthesized
ttcatggagtgggactcagcat

SEQ ID NO: 44663 - DNA, 22 bp, Artificial Sequence
  chemically synthesized
atggagtgggactcagcatttc

SEQ ID NO: 44664 - DNA, 22 bp, Artificial Sequence
  chemically synthesized
agcatttctctctttgttatgg

SEQ ID NO: 44665 - DNA, 22 bp, Artificial Sequence
  chemically synthesized
ctctctttgttatggcctgagt

SEQ ID NO: 44666 - DNA, 22 bp, Artificial Sequence
  chemically synthesized
tctctttgttatggcctgagta

SEQ ID NO: 44667 - DNA, 22 bp, Artificial Sequence
  chemically synthesized
tctttgttatggcctgagtaag

SEQ ID NO: 44668 - DNA, 22 bp, Artificial Sequence
  chemically synthesized
tttgttatggcctgagtaaggc

SEQ ID NO: 44669 - DNA, 22 bp, Artificial Sequence
  chemically synthesized
tgttatggcctgagtaaggctt

SEQ ID NO: 44670 - DNA, 22 bp, Artificial Sequence
  chemically synthesized
gttatggcctgagtaaggcttt

SEQ ID NO: 44671 - DNA, 22 bp, Artificial Sequence
  chemically synthesized
ttatggcctgagtaaggctttc

SEQ ID NO: 44672 - DNA, 22 bp, Artificial Sequence
  chemically synthesized
tggcctgagtaaggctttccat

SEQ ID NO: 44673 - DNA, 22 bp, Artificial Sequence
  chemically synthesized
agtaaggctttccatcggtata

SEQ ID NO: 44674 - DNA, 22 bp, Artificial Sequence
  chemically synthesized
tccatcggtatacatttgcttc

SEQ ID NO: 44675 - DNA, 22 bp, Artificial Sequence
  chemically synthesized
ccatcggtatacatttgcttct

SEQ ID NO: 44676 - DNA, 22 bp, Artificial Sequence
  chemically synthesized
catcggtatacatttgcttctt

SEQ ID NO: 44677 - DNA, 22 bp, Artificial Sequence
  chemically synthesized
gcttcttatccctggagaaatt

SEQ ID NO: 44678 - DNA, 22 bp, Artificial Sequence
  chemically synthesized
cttcttatccctggagaaatta

SEQ ID NO: 44679 - DNA, 22 bp, Artificial Sequence
  chemically synthesized
cttatccctggagaaattatac

SEQ ID NO: 44680 - DNA, 22 bp, Artificial Sequence
  chemically synthesized
ttatccctggagaaattataca

SEQ ID NO: 44681 - DNA, 22 bp, Artificial Sequence
  chemically synthesized
atccctggagaaattatacaca

SEQ ID NO: 44682 - DNA, 22 bp, Artificial Sequence
  chemically synthesized
tccctggagaaattatacacat

SEQ ID NO: 44683 - DNA, 22 bp, Artificial Sequence
  chemically synthesized
gagaaattatacacatccattt

SEQ ID NO: 44684 - DNA, 22 bp, Artificial Sequence
  chemically synthesized
tacacatccatttgccagatga

SEQ ID NO: 44685 - DNA, 22 bp, Artificial Sequence
  chemically synthesized
gccagatgatatacgcatataa

SEQ ID NO: 44686 - DNA, 22 bp, Artificial Sequence
  chemically synthesized
ccagatgatatacgcatataat

SEQ ID NO: 44687 - DNA, 22 bp, Artificial Sequence
  chemically synthesized
aacaaatactcagggtatttgt

SEQ ID NO: 44688 - DNA, 22 bp, Artificial Sequence
  chemically synthesized
agggtatttgttgagtgggtta

SEQ ID NO: 44689 - DNA, 22 bp, Artificial Sequence
  chemically synthesized
gttgagtgggttaggtccccac

SEQ ID NO: 44690 - DNA, 22 bp, Artificial Sequence
  chemically synthesized
ttgagtgggttaggtccccaca

SEQ ID NO: 44691 - DNA, 22 bp, Artificial Sequence
  chemically synthesized
agtgggttaggtccccacattt

SEQ ID NO: 44692 - DNA, 22 bp, Artificial Sequence
  chemically synthesized
ggtccccacatttttatacata

SEQ ID NO: 44693 - DNA, 22 bp, Artificial Sequence
  chemically synthesized
ttatacatacatacacacatac

SEQ ID NO: 44694 - DNA, 22 bp, Artificial Sequence
  chemically synthesized
tatacatacatacacacataca

SEQ ID NO: 44695 - DNA, 22 bp, Artificial Sequence
  chemically synthesized
atacatacatacacacatacac

SEQ ID NO: 44696 - DNA, 22 bp, Artificial Sequence
  chemically synthesized
tacatacatacacacatacaca

SEQ ID NO: 44697 - DNA, 22 bp, Artificial Sequence
  chemically synthesized
tgaatgtaagtgtgtgtccttt

SEQ ID NO: 44698 - DNA, 22 bp, Artificial Sequence
  chemically synthesized
tacaaatactagcttatttagc

SEQ ID NO: 44699 - DNA, 22 bp, Artificial Sequence
  chemically synthesized
acaaatactagcttatttagct

SEQ ID NO: 44700 - DNA, 22 bp, Artificial Sequence
  chemically synthesized
caaatactagcttatttagctc

SEQ ID NO: 44701 - DNA, 22 bp, Artificial Sequence
  chemically synthesized
gcttatttagctcatggtatag

SEQ ID NO: 44702 - DNA, 22 bp, Artificial Sequence
  chemically synthesized
atttagctcatggtataggtag

SEQ ID NO: 44703 - DNA, 22 bp, Artificial Sequence
  chemically synthesized
tttagctcatggtataggtagg

SEQ ID NO: 44704 - DNA, 22 bp, Artificial Sequence
  chemically synthesized
agctcatggtataggtagggta

SEQ ID NO: 44705 - DNA, 22 bp, Artificial Sequence
  chemically synthesized
gctcatggtataggtagggtag

SEQ ID NO: 44706 - DNA, 22 bp, Artificial Sequence
  chemically synthesized
atggtataggtagggtagcata

SEQ ID NO: 44707 - DNA, 22 bp, Artificial Sequence
  chemically synthesized
tataaacaaagaaatctagact

SEQ ID NO: 44708 - DNA, 22 bp, Artificial Sequence
  chemically synthesized
ataaacaaagaaatctagactt

SEQ ID NO: 44709 - DNA, 22 bp, Artificial Sequence
  chemically synthesized
taaacaaagaaatctagactta

SEQ ID NO: 44710 - DNA, 22 bp, Artificial Sequence
  chemically synthesized
gacttaggaaaatcatgttatt

SEQ ID NO: 44711 - DNA, 22 bp, Artificial Sequence
  chemically synthesized
aggaaaatcatgttatttgtct

SEQ ID NO: 44712 - DNA, 22 bp, Artificial Sequence
  chemically synthesized
ggaaaatcatgttatttgtctc

SEQ ID NO: 44713 - DNA, 22 bp, Artificial Sequence
  chemically synthesized
tttgtctcgtgaccaaattccc

SEQ ID NO: 44714 - DNA, 22 bp, Artificial Sequence
  chemically synthesized
gtctcgtgaccaaattcccaaa

SEQ ID NO: 44715 - DNA, 22 bp, Artificial Sequence
  chemically synthesized
tctcgtgaccaaattcccaaat

SEQ ID NO: 44716 - DNA, 22 bp, Artificial Sequence
  chemically synthesized
gtgaccaaattcccaaatcaag

SEQ ID NO: 44717 - DNA, 22 bp, Artificial Sequence
  chemically synthesized
ccaaatcaaggaaataaagaaa

SEQ ID NO: 44718 - DNA, 22 bp, Artificial Sequence
  chemically synthesized
gatttaagccagatttccaaga

SEQ ID NO: 44719 - DNA, 22 bp, Artificial Sequence
  chemically synthesized
aagccagatttccaagaaaaaa

SEQ ID NO: 44720 - DNA, 22 bp, Artificial Sequence
  chemically synthesized
agccagatttccaagaaaaaat

SEQ ID NO: 44721 - DNA, 22 bp, Artificial Sequence
  chemically synthesized
ccaagaaaaaatctagggctct

SEQ ID NO: 44722 - DNA, 22 bp, Artificial Sequence
  chemically synthesized
caagaaaaaatctagggctctt

SEQ ID NO: 44723 - DNA, 22 bp, Artificial Sequence
  chemically synthesized
gggctcttctcactttttcatc

SEQ ID NO: 44724 - DNA, 22 bp, Artificial Sequence
  chemically synthesized
ttctcactttttcatctttgtt

SEQ ID NO: 44725 - DNA, 22 bp, Artificial Sequence
  chemically synthesized
ctcactttttcatctttgttcc

SEQ ID NO: 44726 - DNA, 22 bp, Artificial Sequence
  chemically synthesized
tcactttttcatctttgttcca

SEQ ID NO: 44727 - DNA, 22 bp, Artificial Sequence
  chemically synthesized
actttttcatctttgttccaac

SEQ ID NO: 44728 - DNA, 22 bp, Artificial Sequence
  chemically synthesized
tttcatctttgttccaacattt

SEQ ID NO: 44729 - DNA, 22 bp, Artificial Sequence
  chemically synthesized
ttcatctttgttccaacatttg

SEQ ID NO: 44730 - DNA, 22 bp, Artificial Sequence
  chemically synthesized
tcatctttgttccaacatttga

SEQ ID NO: 44731 - DNA, 22 bp, Artificial Sequence
  chemically synthesized
catctttgttccaacatttgaa

SEQ ID NO: 44732 - DNA, 22 bp, Artificial Sequence
  chemically synthesized
atctttgttccaacatttgaaa

SEQ ID NO: 44733 - DNA, 22 bp, Artificial Sequence
  chemically synthesized
tgttccaacatttgaaaaaata

SEQ ID NO: 44734 - DNA, 22 bp, Artificial Sequence
  chemically synthesized
gttccaacatttgaaaaaataa

SEQ ID NO: 44735 - DNA, 22 bp, Artificial Sequence
  chemically synthesized
ttccaacatttgaaaaaataaa

SEQ ID NO: 44736 - DNA, 22 bp, Artificial Sequence
  chemically synthesized
caacatttgaaaaaataaatct

SEQ ID NO: 44737 - DNA, 22 bp, Artificial Sequence
  chemically synthesized
gaaaaaataaatctaaacacat

SEQ ID NO: 44738 - DNA, 22 bp, Artificial Sequence
  chemically synthesized
aaaaaataaatctaaacacatt

SEQ ID NO: 44739 - DNA, 22 bp, Artificial Sequence
  chemically synthesized
aacacattccaatgtaactgaa

SEQ ID NO: 44740 - DNA, 22 bp, Artificial Sequence
  chemically synthesized
caatgtaactgaagagcaggtt

SEQ ID NO: 44741 - DNA, 22 bp, Artificial Sequence
  chemically synthesized
aagagcaggttaattgtttgcc

SEQ ID NO: 44742 - DNA, 22 bp, Artificial Sequence
  chemically synthesized
attgtttgccacttgcagaatc

SEQ ID NO: 44743 - DNA, 22 bp, Artificial Sequence
  chemically synthesized
tttgccacttgcagaatccaat

SEQ ID NO: 44744 - DNA, 22 bp, Artificial Sequence
  chemically synthesized
gccacttgcagaatccaattaa

SEQ ID NO: 44745 - DNA, 22 bp, Artificial Sequence
  chemically synthesized
ccacttgcagaatccaattaag

SEQ ID NO: 44746 - DNA, 22 bp, Artificial Sequence
  chemically synthesized
gcagaatccaattaagaagaga

SEQ ID NO: 44747 - DNA, 22 bp, Artificial Sequence
  chemically synthesized
cagaatccaattaagaagagag

SEQ ID NO: 44748 - DNA, 22 bp, Artificial Sequence
  chemically synthesized
agaagagagaagtctggtataa

SEQ ID NO: 44749 - DNA, 22 bp, Artificial Sequence
  chemically synthesized
gtataaagaaagtgatttgctt

SEQ ID NO: 44750 - DNA, 22 bp, Artificial Sequence
  chemically synthesized
gcttccaaagctagcttagggg

SEQ ID NO: 44751 - DNA, 22 bp, Artificial Sequence
  chemically synthesized
cttccaaagctagcttagggga

SEQ ID NO: 44752 - DNA, 22 bp, Artificial Sequence
  chemically synthesized
ccaaagctagcttaggggaaga

SEQ ID NO: 44753 - DNA, 22 bp, Artificial Sequence
  chemically synthesized
caaagctagcttaggggaagaa

SEQ ID NO: 44754 - DNA, 22 bp, Artificial Sequence
  chemically synthesized
gcttaggggaagaaatgcagca

SEQ ID NO: 44755 - DNA, 22 bp, Artificial Sequence
  chemically synthesized
aggggaagaaatgcagcagtcc

SEQ ID NO: 44756 - DNA, 22 bp, Artificial Sequence
  chemically synthesized
ggggaagaaatgcagcagtcct

SEQ ID NO: 44757 - DNA, 22 bp, Artificial Sequence
  chemically synthesized
ccgtactacttcactttaggag

SEQ ID NO: 44758 - DNA, 22 bp, Artificial Sequence
  chemically synthesized
cttcactttaggagcagaaagt

SEQ ID NO: 44759 - DNA, 22 bp, Artificial Sequence
  chemically synthesized
cactttaggagcagaaagtggc

SEQ ID NO: 44760 - DNA, 22 bp, Artificial Sequence
  chemically synthesized
actttaggagcagaaagtggca

SEQ ID NO: 44761 - DNA, 22 bp, Artificial Sequence
  chemically synthesized
taggagcagaaagtggcacttt

SEQ ID NO: 44762 - DNA, 22 bp, Artificial Sequence
  chemically synthesized
aggagcagaaagtggcactttt

SEQ ID NO: 44763 - DNA, 22 bp, Artificial Sequence
  chemically synthesized
ggagcagaaagtggcactttta

SEQ ID NO: 44764 - DNA, 22 bp, Artificial Sequence
  chemically synthesized
ttaaaaggcaacagaggaggcg

SEQ ID NO: 44765 - DNA, 22 bp, Artificial Sequence
  chemically synthesized
taaaaggcaacagaggaggcga

SEQ ID NO: 44766 - DNA, 22 bp, Artificial Sequence
  chemically synthesized
aaaaggcaacagaggaggcgag

SEQ ID NO: 44767 - DNA, 22 bp, Artificial Sequence
  chemically synthesized
aaaggcaacagaggaggcgagc

SEQ ID NO: 44768 - DNA, 22 bp, Artificial Sequence
  chemically synthesized
aggggtccatgctagcttgggc

SEQ ID NO: 44769 - DNA, 22 bp, Artificial Sequence
  chemically synthesized
gcttgggcaccttatccaccag

SEQ ID NO: 44770 - DNA, 22 bp, Artificial Sequence
  chemically synthesized
gggcaccttatccaccaggtag

SEQ ID NO: 44771 - DNA, 22 bp, Artificial Sequence
  chemically synthesized
ggcaccttatccaccaggtagt

SEQ ID NO: 44772 - DNA, 22 bp, Artificial Sequence
  chemically synthesized
atccaccaggtagttgagcagt

SEQ ID NO: 44773 - DNA, 22 bp, Artificial Sequence
  chemically synthesized
tccaccaggtagttgagcagtt

SEQ ID NO: 44774 - DNA, 22 bp, Artificial Sequence
  chemically synthesized
agcagttgcctgctggtgcctt

SEQ ID NO: 44775 - DNA, 22 bp, Artificial Sequence
  chemically synthesized
cctgctggtgcctttgtgagca

SEQ ID NO: 44776 - DNA, 22 bp, Artificial Sequence
  chemically synthesized
ctggtgcctttgtgagcagggt

SEQ ID NO: 44777 - DNA, 22 bp, Artificial Sequence
  chemically synthesized
gtgcctttgtgagcagggtgtt

SEQ ID NO: 44778 - DNA, 22 bp, Artificial Sequence
  chemically synthesized
tgtgagcagggtgttgtccctt

SEQ ID NO: 44779 - DNA, 22 bp, Artificial Sequence
  chemically synthesized
gtgagcagggtgttgtcccttg

SEQ ID NO: 44780 - DNA, 22 bp, Artificial Sequence
  chemically synthesized
tgagcagggtgttgtcccttga

SEQ ID NO: 44781 - DNA, 22 bp, Artificial Sequence
  chemically synthesized
tcccttgaggcaaatctctgga

SEQ ID NO: 44782 - DNA, 22 bp, Artificial Sequence
  chemically synthesized
gaggcaaatctctggagggtga

SEQ ID NO: 44783 - DNA, 22 bp, Artificial Sequence
  chemically synthesized
aggcaaatctctggagggtgag

SEQ ID NO: 44784 - DNA, 22 bp, Artificial Sequence
  chemically synthesized
tggagggtgagagttttgtagt

SEQ ID NO: 44785 - DNA, 22 bp, Artificial Sequence
  chemically synthesized
gagggtgagagttttgtagtgg

SEQ ID NO: 44786 - DNA, 22 bp, Artificial Sequence
  chemically synthesized
tgtagtgggcatgctttggttt

SEQ ID NO: 44787 - DNA, 22 bp, Artificial Sequence
  chemically synthesized
gtagtgggcatgctttggttta

SEQ ID NO: 44788 - DNA, 22 bp, Artificial Sequence
  chemically synthesized
tagtgggcatgctttggtttat

SEQ ID NO: 44789 - DNA, 22 bp, Artificial Sequence
  chemically synthesized
tggtttataaatcacctgtgaa

SEQ ID NO: 44790 - DNA, 22 bp, Artificial Sequence
  chemically synthesized
ggtttataaatcacctgtgaac

SEQ ID NO: 44791 - DNA, 22 bp, Artificial Sequence
  chemically synthesized
gtttataaatcacctgtgaact

SEQ ID NO: 44792 - DNA, 22 bp, Artificial Sequence
  chemically synthesized
ataaatcacctgtgaactcagg

SEQ ID NO: 44793 - DNA, 22 bp, Artificial Sequence
  chemically synthesized
taaatcacctgtgaactcagga

SEQ ID NO: 44794 - DNA, 22 bp, Artificial Sequence
  chemically synthesized
tgaactcaggagttccatcttg

SEQ ID NO: 44795 - DNA, 22 bp, Artificial Sequence
  chemically synthesized
aggagttccatcttgaagcaca

SEQ ID NO: 44796 - DNA, 22 bp, Artificial Sequence
  chemically synthesized
catcttgaagcacatacatagt

SEQ ID NO: 44797 - DNA, 22 bp, Artificial Sequence
  chemically synthesized
gaagcacatacatagttagatg

SEQ ID NO: 44798 - DNA, 22 bp, Artificial Sequence
  chemically synthesized
aagcacatacatagttagatga

SEQ ID NO: 44799 - DNA, 22 bp, Artificial Sequence
  chemically synthesized
gatgaacttgccctgcagggag

SEQ ID NO: 44800 - DNA, 22 bp, Artificial Sequence
  chemically synthesized
gccctgcagggagagtctgatg

SEQ ID NO: 44801 - DNA, 22 bp, Artificial Sequence
  chemically synthesized
ccctgcagggagagtctgatga

SEQ ID NO: 44802 - DNA, 22 bp, Artificial Sequence
  chemically synthesized
cagggagagtctgatgaaaggg

SEQ ID NO: 44803 - DNA, 22 bp, Artificial Sequence
  chemically synthesized
atgaaagggaggtagatgcttg

SEQ ID NO: 44804 - DNA, 22 bp, Artificial Sequence
  chemically synthesized
gcaatttaatctataaattacc

SEQ ID NO: 44805 - DNA, 22 bp, Artificial Sequence
  chemically synthesized
caatttaatctataaattacca

SEQ ID NO: 44806 - DNA, 22 bp, Artificial Sequence
  chemically synthesized
aatctataaattaccagataaa

SEQ ID NO: 44807 - DNA, 22 bp, Artificial Sequence
  chemically synthesized
atctataaattaccagataaaa

SEQ ID NO: 44808 - DNA, 22 bp, Artificial Sequence
  chemically synthesized
taaattaccagataaaatttta

SEQ ID NO: 44809 - DNA, 22 bp, Artificial Sequence
  chemically synthesized
ccagataaaattttacaagttg

SEQ ID NO: 44810 - DNA, 22 bp, Artificial Sequence
  chemically synthesized
tacaagttgactttaaagtcaa

SEQ ID NO: 44811 - DNA, 22 bp, Artificial Sequence
  chemically synthesized
acaagttgactttaaagtcaaa

SEQ ID NO: 44812 - DNA, 22 bp, Artificial Sequence
  chemically synthesized
caagttgactttaaagtcaaac

SEQ ID NO: 44813 - DNA, 22 bp, Artificial Sequence
  chemically synthesized
actttaaagtcaaacacatttg

SEQ ID NO: 44814 - DNA, 22 bp, Artificial Sequence
  chemically synthesized
taaagtcaaacacatttgaatt

SEQ ID NO: 44815 - DNA, 22 bp, Artificial Sequence
  chemically synthesized
aaagtcaaacacatttgaattt

SEQ ID NO: 44816 - DNA, 22 bp, Artificial Sequence
  chemically synthesized
aagtcaaacacatttgaattta

SEQ ID NO: 44817 - DNA, 22 bp, Artificial Sequence
  chemically synthesized
gaatttagtggaagccattcaa

SEQ ID NO: 44818 - DNA, 22 bp, Artificial Sequence
  chemically synthesized
aatttagtggaagccattcaag

SEQ ID NO: 44819 - DNA, 22 bp, Artificial Sequence
  chemically synthesized
agtggaagccattcaagaaaat

SEQ ID NO: 44820 - DNA, 22 bp, Artificial Sequence
  chemically synthesized
gtggaagccattcaagaaaata

SEQ ID NO: 44821 - DNA, 22 bp, Artificial Sequence
  chemically synthesized
aagaaaatatcaaagaaaatac

SEQ ID NO: 44822 - DNA, 22 bp, Artificial Sequence
  chemically synthesized
agcaaagagttttttggggaaa

SEQ ID NO: 44823 - DNA, 22 bp, Artificial Sequence
  chemically synthesized
tttggggaaattggtgtctatg

SEQ ID NO: 44824 - DNA, 22 bp, Artificial Sequence
  chemically synthesized
ttggggaaattggtgtctatgt

SEQ ID NO: 44825 - DNA, 22 bp, Artificial Sequence
  chemically synthesized
tggggaaattggtgtctatgtc

SEQ ID NO: 44826 - DNA, 22 bp, Artificial Sequence
  chemically synthesized
ggggaaattggtgtctatgtct

SEQ ID NO: 44827 - DNA, 22 bp, Artificial Sequence
  chemically synthesized
gggaaattggtgtctatgtctg

SEQ ID NO: 44828 - DNA, 22 bp, Artificial Sequence
  chemically synthesized
gtgtctatgtctgtgtgtgtag

SEQ ID NO: 44829 - DNA, 22 bp, Artificial Sequence
  chemically synthesized
tgtctgtgtgtgtagggagtgc

SEQ ID NO: 44830 - DNA, 22 bp, Artificial Sequence
  chemically synthesized
tgtgtgtagggagtgcagggga

SEQ ID NO: 44831 - DNA, 22 bp, Artificial Sequence
  chemically synthesized
tatttcagcccatggaaactag

SEQ ID NO: 44832 - DNA, 22 bp, Artificial Sequence
  chemically synthesized
tttcagcccatggaaactagga

SEQ ID NO: 44833 - DNA, 22 bp, Artificial Sequence
  chemically synthesized
cagcccatggaaactaggatgt

SEQ ID NO: 44834 - DNA, 22 bp, Artificial Sequence
  chemically synthesized
agcccatggaaactaggatgta

SEQ ID NO: 44835 - DNA, 22 bp, Artificial Sequence
  chemically synthesized
ggatgtagatcactgtgaactt

SEQ ID NO: 44836 - DNA, 22 bp, Artificial Sequence
  chemically synthesized
tgaacttattcagcaggctaca

SEQ ID NO: 44837 - DNA, 22 bp, Artificial Sequence
  chemically synthesized
attcagcaggctacacccaaag

SEQ ID NO: 44838 - DNA, 22 bp, Artificial Sequence
  chemically synthesized
ttcagcaggctacacccaaagg

SEQ ID NO: 44839 - DNA, 22 bp, Artificial Sequence
  chemically synthesized
agcaggctacacccaaaggcta

SEQ ID NO: 44840 - DNA, 22 bp, Artificial Sequence
  chemically synthesized
cacccaaaggctagaacaaact

SEQ ID NO: 44841 - DNA, 22 bp, Artificial Sequence
  chemically synthesized
gaacaaacttctctgccacagg

SEQ ID NO: 44842 - DNA, 22 bp, Artificial Sequence
  chemically synthesized
ctctgccacaggattaacatat

SEQ ID NO: 44843 - DNA, 22 bp, Artificial Sequence
  chemically synthesized
tctgccacaggattaacatatg

SEQ ID NO: 44844 - DNA, 22 bp, Artificial Sequence
  chemically synthesized
tgccacaggattaacatatgtt

SEQ ID NO: 44845 - DNA, 22 bp, Artificial Sequence
  chemically synthesized
ccacaggattaacatatgtttt

SEQ ID NO: 44846 - DNA, 22 bp, Artificial Sequence
  chemically synthesized
acatatgttttaatcgacctgg

SEQ ID NO: 44847 - DNA, 22 bp, Artificial Sequence
  chemically synthesized
taatcgacctggggggcacatt

SEQ ID NO: 44848 - DNA, 22 bp, Artificial Sequence
  chemically synthesized
aatcgacctggggggcacattc

SEQ ID NO: 44849 - DNA, 22 bp, Artificial Sequence
  chemically synthesized
atcgacctggggggcacattct

SEQ ID NO: 44850 - DNA, 22 bp, Artificial Sequence
  chemically synthesized
gggggcacattctctgataagc

SEQ ID NO: 44851 - DNA, 22 bp, Artificial Sequence
  chemically synthesized
tctgataagctcttttggaaag

SEQ ID NO: 44852 - DNA, 22 bp, Artificial Sequence
  chemically synthesized
tgataagctcttttggaaagcc

SEQ ID NO: 44853 - DNA, 22 bp, Artificial Sequence
  chemically synthesized
ataagctcttttggaaagccag

SEQ ID NO: 44854 - DNA, 22 bp, Artificial Sequence
  chemically synthesized
ttttggaaagccaggctttctg

SEQ ID NO: 44855 - DNA, 22 bp, Artificial Sequence
  chemically synthesized
ttggaaagccaggctttctgtg

SEQ ID NO: 44856 - DNA, 22 bp, Artificial Sequence
  chemically synthesized
tggaaagccaggctttctgtgg

SEQ ID NO: 44857 - DNA, 22 bp, Artificial Sequence
  chemically synthesized
ggaaagccaggctttctgtgga

SEQ ID NO: 44858 - DNA, 22 bp, Artificial Sequence
  chemically synthesized
gaaagccaggctttctgtggac

SEQ ID NO: 44859 - DNA, 22 bp, Artificial Sequence
  chemically synthesized
tctgtggacgtgttatctttcc

SEQ ID NO: 44860 - DNA, 22 bp, Artificial Sequence
  chemically synthesized
ctgtggacgtgttatctttcca

SEQ ID NO: 44861 - DNA, 22 bp, Artificial Sequence
  chemically synthesized
tgtggacgtgttatctttccaa

SEQ ID NO: 44862 - DNA, 22 bp, Artificial Sequence
  chemically synthesized
tggacgtgttatctttccaatg

SEQ ID NO: 44863 - DNA, 22 bp, Artificial Sequence
  chemically synthesized
tctttccaatgtgtgctggaat

SEQ ID NO: 44864 - DNA, 22 bp, Artificial Sequence
  chemically synthesized
tccaatgtgtgctggaatgccc

SEQ ID NO: 44865 - DNA, 22 bp, Artificial Sequence
  chemically synthesized
ccaatgtgtgctggaatgcccg

SEQ ID NO: 44866 - DNA, 22 bp, Artificial Sequence
  chemically synthesized
caatgtgtgctggaatgcccgg

SEQ ID NO: 44867 - DNA, 22 bp, Artificial Sequence
  chemically synthesized
gaatgcccggggagaggaaaaa

SEQ ID NO: 44868 - DNA, 22 bp, Artificial Sequence
  chemically synthesized
cttttacagccatgctcagtga

SEQ ID NO: 44869 - DNA, 22 bp, Artificial Sequence
  chemically synthesized
ttttacagccatgctcagtgag

SEQ ID NO: 44870 - DNA, 22 bp, Artificial Sequence
  chemically synthesized
ttacagccatgctcagtgagaa

SEQ ID NO: 44871 - DNA, 22 bp, Artificial Sequence
  chemically synthesized
tacagccatgctcagtgagaag

SEQ ID NO: 44872 - DNA, 22 bp, Artificial Sequence
  chemically synthesized
acagccatgctcagtgagaagc

SEQ ID NO: 44873 - DNA, 22 bp, Artificial Sequence
  chemically synthesized
cagccatgctcagtgagaagcg

SEQ ID NO: 44874 - DNA, 22 bp, Artificial Sequence
  chemically synthesized
agtgagaagcggagaaacatct

SEQ ID NO: 44875 - DNA, 22 bp, Artificial Sequence
  chemically synthesized
ctattcacaaattgctaagtct

SEQ ID NO: 44876 - DNA, 22 bp, Artificial Sequence
  chemically synthesized
tattcacaaattgctaagtctt

SEQ ID NO: 44877 - DNA, 22 bp, Artificial Sequence
  chemically synthesized
ttcacaaattgctaagtctttt

SEQ ID NO: 44878 - DNA, 22 bp, Artificial Sequence
  chemically synthesized
acaaattgctaagtcttttaca

SEQ ID NO: 44879 - DNA, 22 bp, Artificial Sequence
  chemically synthesized
ctaagtcttttacacatgcaaa

SEQ ID NO: 44880 - DNA, 22 bp, Artificial Sequence
  chemically synthesized
agtcttttacacatgcaaatat

SEQ ID NO: 44881 - DNA, 22 bp, Artificial Sequence
  chemically synthesized
ttacacatgcaaatatgcatac

SEQ ID NO: 44882 - DNA, 22 bp, Artificial Sequence
  chemically synthesized
tacacatgcaaatatgcataca

SEQ ID NO: 44883 - DNA, 22 bp, Artificial Sequence
  chemically synthesized
acacatgcaaatatgcatacac

SEQ ID NO: 44884 - DNA, 22 bp, Artificial Sequence
  chemically synthesized
cacatgcaaatatgcatacaca

SEQ ID NO: 44885 - DNA, 22 bp, Artificial Sequence
  chemically synthesized
acacaccacagtgaggaagaaa

SEQ ID NO: 44886 - DNA, 22 bp, Artificial Sequence
  chemically synthesized
tcacaccattaataaaatacat

SEQ ID NO: 44887 - DNA, 22 bp, Artificial Sequence
  chemically synthesized
acaccattaataaaatacattt

SEQ ID NO: 44888 - DNA, 22 bp, Artificial Sequence
  chemically synthesized
ataaaatacatttacttcagta

SEQ ID NO: 44889 - DNA, 22 bp, Artificial Sequence
  chemically synthesized
acttcagtagcaatatacatct

SEQ ID NO: 44890 - DNA, 22 bp, Artificial Sequence
  chemically synthesized
cttcagtagcaatatacatcta

SEQ ID NO: 44891 - DNA, 22 bp, Artificial Sequence
  chemically synthesized
cagtagcaatatacatctacat

SEQ ID NO: 44892 - DNA, 22 bp, Artificial Sequence
  chemically synthesized
agtagcaatatacatctacatt

SEQ ID NO: 44893 - DNA, 22 bp, Artificial Sequence
  chemically synthesized
cattttgcctataatataaaag

SEQ ID NO: 44894 - DNA, 22 bp, Artificial Sequence
  chemically synthesized
tgcctataatataaaagtattt

SEQ ID NO: 44895 - DNA, 22 bp, Artificial Sequence
  chemically synthesized
gcctataatataaaagtatttt

SEQ ID NO: 44896 - DNA, 22 bp, Artificial Sequence
  chemically synthesized
cctataatataaaagtattttt

SEQ ID NO: 44897 - DNA, 22 bp, Artificial Sequence
  chemically synthesized
taatataaaagtatttttccta

SEQ ID NO: 44898 - DNA, 22 bp, Artificial Sequence
  chemically synthesized
ttcctattaaaagatttgttta

SEQ ID NO: 44899 - DNA, 22 bp, Artificial Sequence
  chemically synthesized
tcctattaaaagatttgtttaa

SEQ ID NO: 44900 - DNA, 22 bp, Artificial Sequence
  chemically synthesized
cctattaaaagatttgtttaat

SEQ ID NO: 44901 - DNA, 22 bp, Artificial Sequence
  chemically synthesized
ctattaaaagatttgtttaatg

SEQ ID NO: 44902 - DNA, 22 bp, Artificial Sequence
  chemically synthesized
ttaaaagatttgtttaatgttt

SEQ ID NO: 44903 - DNA, 22 bp, Artificial Sequence
  chemically synthesized
aaagatttgtttaatgtttctt

SEQ ID NO: 44904 - DNA, 22 bp, Artificial Sequence
  chemically synthesized
gtttaatgtttcttcaccaaca

SEQ ID NO: 44905 - DNA, 22 bp, Artificial Sequence
  chemically synthesized
tttaatgtttcttcaccaacaa

SEQ ID NO: 44906 - DNA, 22 bp, Artificial Sequence
  chemically synthesized
aatgtttcttcaccaacaaata

SEQ ID NO: 44907 - DNA, 22 bp, Artificial Sequence
  chemically synthesized
atgtttcttcaccaacaaataa

SEQ ID NO: 44908 - DNA, 22 bp, Artificial Sequence
  chemically synthesized
cttcaccaacaaataaacccta

SEQ ID NO: 44909 - DNA, 22 bp, Artificial Sequence
  chemically synthesized
ttcaccaacaaataaaccctat

SEQ ID NO: 44910 - DNA, 22 bp, Artificial Sequence
  chemically synthesized
caccaacaaataaaccctatta

SEQ ID NO: 44911 - DNA, 22 bp, Artificial Sequence
  chemically synthesized
accaacaaataaaccctattaa

SEQ ID NO: 44912 - DNA, 22 bp, Artificial Sequence
  chemically synthesized
ttaaatccccattgccatatga

SEQ ID NO: 44913 - DNA, 22 bp, Artificial Sequence
  chemically synthesized
aatccccattgccatatgagcc

SEQ ID NO: 44914 - DNA, 22 bp, Artificial Sequence
  chemically synthesized
ccatatgagccctggaggtgaa

SEQ ID NO: 44915 - DNA, 22 bp, Artificial Sequence
  chemically synthesized
gaggtgaatcagagaaacaaaa

SEQ ID NO: 44916 - DNA, 22 bp, Artificial Sequence
  chemically synthesized
tggaaaaatcatcaggttaaaa

SEQ ID NO: 44917 - DNA, 22 bp, Artificial Sequence
  chemically synthesized
aaaaaagaaaaattgattctgt

SEQ ID NO: 44918 - DNA, 22 bp, Artificial Sequence
  chemically synthesized
attctgttttgggatatttcct

SEQ ID NO: 44919 - DNA, 22 bp, Artificial Sequence
  chemically synthesized
tgttttgggatatttcctagca

SEQ ID NO: 44920 - DNA, 22 bp, Artificial Sequence
  chemically synthesized
ttttgggatatttcctagcaac

SEQ ID NO: 44921 - DNA, 22 bp, Artificial Sequence
  chemically synthesized
tgggatatttcctagcaacatg

SEQ ID NO: 44922 - DNA, 22 bp, Artificial Sequence
  chemically synthesized
gggatatttcctagcaacatga

SEQ ID NO: 44923 - DNA, 22 bp, Artificial Sequence
  chemically synthesized
ggatatttcctagcaacatgag

SEQ ID NO: 44924 - DNA, 22 bp, Artificial Sequence
  chemically synthesized
cctagcaacatgagctggggag

SEQ ID NO: 44925 - DNA, 22 bp, Artificial Sequence
  chemically synthesized
ctagcaacatgagctggggagg

SEQ ID NO: 44926 - DNA, 22 bp, Artificial Sequence
  chemically synthesized
gcaacatgagctggggagggga

SEQ ID NO: 44927 - DNA, 22 bp, Artificial Sequence
  chemically synthesized
gggaggggatctcagcagtgat

SEQ ID NO: 44928 - DNA, 22 bp, Artificial Sequence
  chemically synthesized
agcagtgatgctctatgaagca

SEQ ID NO: 44929 - DNA, 22 bp, Artificial Sequence
  chemically synthesized
tatgaagcataataaaatgaca

SEQ ID NO: 44930 - DNA, 22 bp, Artificial Sequence
  chemically synthesized
tgaagcataataaaatgacaca

SEQ ID NO: 44931 - DNA, 22 bp, Artificial Sequence
  chemically synthesized
caggtaacttagttaaaggggg

SEQ ID NO: 44932 - DNA, 22 bp, Artificial Sequence
  chemically synthesized
agttaaagggggaaataaatgg

SEQ ID NO: 44933 - DNA, 22 bp, Artificial Sequence
  chemically synthesized
gttaaagggggaaataaatgga

SEQ ID NO: 44934 - DNA, 22 bp, Artificial Sequence
  chemically synthesized
aagggggaaataaatggaagtt

SEQ ID NO: 44935 - DNA, 22 bp, Artificial Sequence
  chemically synthesized
cctctttttgaatatcaattgt

SEQ ID NO: 44936 - DNA, 22 bp, Artificial Sequence
  chemically synthesized
ctctttttgaatatcaattgta

SEQ ID NO: 44937 - DNA, 22 bp, Artificial Sequence
  chemically synthesized
tttttgaatatcaattgtagcc

SEQ ID NO: 44938 - DNA, 22 bp, Artificial Sequence
  chemically synthesized
tttgaatatcaattgtagcctg

SEQ ID NO: 44939 - DNA, 22 bp, Artificial Sequence
  chemically synthesized
ttgaatatcaattgtagcctgc

SEQ ID NO: 44940 - DNA, 22 bp, Artificial Sequence
  chemically synthesized
tgaatatcaattgtagcctgct

SEQ ID NO: 44941 - DNA, 22 bp, Artificial Sequence
  chemically synthesized
gaatatcaattgtagcctgctc

SEQ ID NO: 44942 - DNA, 22 bp, Artificial Sequence
  chemically synthesized
aatatcaattgtagcctgctct

SEQ ID NO: 44943 - DNA, 22 bp, Artificial Sequence
  chemically synthesized
tagcctgctctgctacatttca

SEQ ID NO: 44944 - DNA, 22 bp, Artificial Sequence
  chemically synthesized
ctctgctacatttcaaaaacac

SEQ ID NO: 44945 - DNA, 22 bp, Artificial Sequence
  chemically synthesized
tgctacatttcaaaaacactct

SEQ ID NO: 44946 - DNA, 22 bp, Artificial Sequence
  chemically synthesized
ctacatttcaaaaacactcttc

SEQ ID NO: 44947 - DNA, 22 bp, Artificial Sequence
  chemically synthesized
catttcaaaaacactcttcaaa

SEQ ID NO: 44948 - DNA, 22 bp, Artificial Sequence
  chemically synthesized
caaaaacactcttcaaaatgtt

SEQ ID NO: 44949 - DNA, 22 bp, Artificial Sequence
  chemically synthesized
aaaaacactcttcaaaatgttt

SEQ ID NO: 44950 - DNA, 22 bp, Artificial Sequence
  chemically synthesized
ttcaaaatgtttaactgaactc

SEQ ID NO: 44951 - DNA, 22 bp, Artificial Sequence
  chemically synthesized
caaaatgtttaactgaactcac

SEQ ID NO: 44952 - DNA, 22 bp, Artificial Sequence
  chemically synthesized
aaaatgtttaactgaactcact

SEQ ID NO: 44953 - DNA, 22 bp, Artificial Sequence
  chemically synthesized
aactgaactcactgtaggaagc

SEQ ID NO: 44954 - DNA, 22 bp, Artificial Sequence
  chemically synthesized
actgaactcactgtaggaagca

SEQ ID NO: 44955 - DNA, 22 bp, Artificial Sequence
  chemically synthesized
aactcactgtaggaagcacctt

SEQ ID NO: 44956 - DNA, 22 bp, Artificial Sequence
  chemically synthesized
actgtaggaagcaccttattaa

SEQ ID NO: 44957 - DNA, 22 bp, Artificial Sequence
  chemically synthesized
taggaagcaccttattaattta

SEQ ID NO: 44958 - DNA, 22 bp, Artificial Sequence
  chemically synthesized
attaatttattgtgtgttttga

SEQ ID NO: 44959 - DNA, 22 bp, Artificial Sequence
  chemically synthesized
ttaatttattgtgtgttttgaa

SEQ ID NO: 44960 - DNA, 22 bp, Artificial Sequence
  chemically synthesized
atttattgtgtgttttgaagtc

SEQ ID NO: 44961 - DNA, 22 bp, Artificial Sequence
  chemically synthesized
attgtgtgttttgaagtcacac

SEQ ID NO: 44962 - DNA, 22 bp, Artificial Sequence
  chemically synthesized
ttgtgtgttttgaagtcacact

SEQ ID NO: 44963 - DNA, 22 bp, Artificial Sequence
  chemically synthesized
tgtgttttgaagtcacactgtg

SEQ ID NO: 44964 - DNA, 22 bp, Artificial Sequence
  chemically synthesized
tgaagtcacactgtgagctata

SEQ ID NO: 44965 - DNA, 22 bp, Artificial Sequence
  chemically synthesized
gaagtcacactgtgagctatag

SEQ ID NO: 44966 - DNA, 22 bp, Artificial Sequence
  chemically synthesized
aagtcacactgtgagctataga

SEQ ID NO: 44967 - DNA, 22 bp, Artificial Sequence
  chemically synthesized
tgagctatagaatttacccaag

SEQ ID NO: 44968 - DNA, 22 bp, Artificial Sequence
  chemically synthesized
tagaatttacccaagcacaact

SEQ ID NO: 44969 - DNA, 22 bp, Artificial Sequence
  chemically synthesized
acccaagcacaactcttcctgg

SEQ ID NO: 44970 - DNA, 22 bp, Artificial Sequence
  chemically synthesized
cccaagcacaactcttcctgga

SEQ ID NO: 44971 - DNA, 22 bp, Artificial Sequence
  chemically synthesized
ttcctggaaaagagagttcaaa

SEQ ID NO: 44972 - DNA, 22 bp, Artificial Sequence
  chemically synthesized
cctggaaaagagagttcaaatg

SEQ ID NO: 44973 - DNA, 22 bp, Artificial Sequence
  chemically synthesized
ctggaaaagagagttcaaatga

SEQ ID NO: 44974 - DNA, 22 bp, Artificial Sequence
  chemically synthesized
gaaaagagagttcaaatgagaa

SEQ ID NO: 44975 - DNA, 22 bp, Artificial Sequence
  chemically synthesized
aaatgagaaacagtgcggggtg

SEQ ID NO: 44976 - DNA, 22 bp, Artificial Sequence
  chemically synthesized
aaatatctatttctcaatgata

SEQ ID NO: 44977 - DNA, 22 bp, Artificial Sequence
  chemically synthesized
tttctcaatgatattttgatat

SEQ ID NO: 44978 - DNA, 22 bp, Artificial Sequence
  chemically synthesized
ctcaatgatattttgatatatc

SEQ ID NO: 44979 - DNA, 22 bp, Artificial Sequence
  chemically synthesized
tcaatgatattttgatatatct

SEQ ID NO: 44980 - DNA, 22 bp, Artificial Sequence
  chemically synthesized
aatgatattttgatatatctat

SEQ ID NO: 44981 - DNA, 22 bp, Artificial Sequence
  chemically synthesized
tgatatatctatcaagtgcttt

SEQ ID NO: 44982 - DNA, 22 bp, Artificial Sequence
  chemically synthesized
gatatatctatcaagtgctttt

SEQ ID NO: 44983 - DNA, 22 bp, Artificial Sequence
  chemically synthesized
atatatctatcaagtgcttttt

SEQ ID NO: 44984 - DNA, 22 bp, Artificial Sequence
  chemically synthesized
tcaagtgctttttagtggatta

SEQ ID NO: 44985 - DNA, 22 bp, Artificial Sequence
  chemically synthesized
tttagtggattaggttcagaat

SEQ ID NO: 44986 - DNA, 22 bp, Artificial Sequence
  chemically synthesized
ttagtggattaggttcagaatg

SEQ ID NO: 44987 - DNA, 22 bp, Artificial Sequence
  chemically synthesized
tagtggattaggttcagaatgc

SEQ ID NO: 44988 - DNA, 22 bp, Artificial Sequence
  chemically synthesized
agtggattaggttcagaatgca

SEQ ID NO: 44989 - DNA, 22 bp, Artificial Sequence
  chemically synthesized
gtggattaggttcagaatgcat

SEQ ID NO: 44990 - DNA, 22 bp, Artificial Sequence
  chemically synthesized
ggttcagaatgcatcagccaat

SEQ ID NO: 44991 - DNA, 22 bp, Artificial Sequence
  chemically synthesized
agaatgcatcagccaatgcctg

SEQ ID NO: 44992 - DNA, 22 bp, Artificial Sequence
  chemically synthesized
ttcaataatccagttttccagc

SEQ ID NO: 44993 - DNA, 22 bp, Artificial Sequence
  chemically synthesized
aataatccagttttccagcata

SEQ ID NO: 44994 - DNA, 22 bp, Artificial Sequence
  chemically synthesized
tccagcatagagcatattaaat

SEQ ID NO: 44995 - DNA, 22 bp, Artificial Sequence
  chemically synthesized
ccagcatagagcatattaaatt

SEQ ID NO: 44996 - DNA, 22 bp, Artificial Sequence
  chemically synthesized
cagcatagagcatattaaattg

SEQ ID NO: 44997 - DNA, 22 bp, Artificial Sequence
  chemically synthesized
aattgaggaaggacaaagtcac

SEQ ID NO: 44998 - DNA, 22 bp, Artificial Sequence
  chemically synthesized
aggaaggacaaagtcacagagg

SEQ ID NO: 44999 - DNA, 22 bp, Artificial Sequence
  chemically synthesized
tggccaaggactttgcatgaaa

SEQ ID NO: 45000 - DNA, 22 bp, Artificial Sequence
  chemically synthesized
tgcatgaaacagtgagcgtgca

SEQ ID NO: 45001 - DNA, 22 bp, Artificial Sequence
  chemically synthesized
gcatgaaacagtgagcgtgcat

SEQ ID NO: 45002 - DNA, 22 bp, Artificial Sequence
  chemically synthesized
catgaaacagtgagcgtgcatc

SEQ ID NO: 45003 - DNA, 22 bp, Artificial Sequence
  chemically synthesized
ctccttgccctgccctcatggt

SEQ ID NO: 45004 - DNA, 22 bp, Artificial Sequence
  chemically synthesized
cttgccctgccctcatggtctg

SEQ ID NO: 45005 - DNA, 22 bp, Artificial Sequence
  chemically synthesized
gccctgccctcatggtctgtgt

SEQ ID NO: 45006 - DNA, 22 bp, Artificial Sequence
  chemically synthesized
ccctgccctcatggtctgtgta

SEQ ID NO: 45007 - DNA, 22 bp, Artificial Sequence
  chemically synthesized
ccctcatggtctgtgtactctc

SEQ ID NO: 45008 - DNA, 22 bp, Artificial Sequence
  chemically synthesized
atggtctgtgtactctcaggag

SEQ ID NO: 45009 - DNA, 22 bp, Artificial Sequence
  chemically synthesized
tgtactctcaggaggtcaggac

SEQ ID NO: 45010 - DNA, 22 bp, Artificial Sequence
  chemically synthesized
tcaggaggtcaggacaggcctt

SEQ ID NO: 45011 - DNA, 22 bp, Artificial Sequence
  chemically synthesized
aggaggtcaggacaggcctttc

SEQ ID NO: 45012 - DNA, 22 bp, Artificial Sequence
  chemically synthesized
tctgagaatgagaatctgttca

SEQ ID NO: 45013 - DNA, 22 bp, Artificial Sequence
  chemically synthesized
ctgagaatgagaatctgttcat

SEQ ID NO: 45014 - DNA, 22 bp, Artificial Sequence
  chemically synthesized
tgagaatgagaatctgttcatc

SEQ ID NO: 45015 - DNA, 22 bp, Artificial Sequence
  chemically synthesized
agaatgagaatctgttcatctg

SEQ ID NO: 45016 - DNA, 22 bp, Artificial Sequence
  chemically synthesized
ttcatctgcctttctactggat

SEQ ID NO: 45017 - DNA, 22 bp, Artificial Sequence
  chemically synthesized
atctgcctttctactggatact

SEQ ID NO: 45018 - DNA, 22 bp, Artificial Sequence
  chemically synthesized
cctttctactggatacttgtca

SEQ ID NO: 45019 - DNA, 22 bp, Artificial Sequence
  chemically synthesized
tctactggatacttgtcatcgg

SEQ ID NO: 45020 - DNA, 22 bp, Artificial Sequence
  chemically synthesized
ctactggatacttgtcatcggc

SEQ ID NO: 45021 - DNA, 22 bp, Artificial Sequence
  chemically synthesized
tactggatacttgtcatcggca

SEQ ID NO: 45022 - DNA, 22 bp, Artificial Sequence
  chemically synthesized
ctggatacttgtcatcggcata

SEQ ID NO: 45023 - DNA, 22 bp, Artificial Sequence
  chemically synthesized
gatacttgtcatcggcatacaa

SEQ ID NO: 45024 - DNA, 22 bp, Artificial Sequence
  chemically synthesized
gtcatcggcatacaaacacatg

SEQ ID NO: 45025 - DNA, 22 bp, Artificial Sequence
  chemically synthesized
tcatcggcatacaaacacatgt

SEQ ID NO: 45026 - DNA, 22 bp, Artificial Sequence
  chemically synthesized
tctgcagtgtgtcatctttcag

SEQ ID NO: 45027 - DNA, 22 bp, Artificial Sequence
  chemically synthesized
tgcagtgtgtcatctttcagaa

SEQ ID NO: 45028 - DNA, 22 bp, Artificial Sequence
  chemically synthesized
cagtgtgtcatctttcagaacc

SEQ ID NO: 45029 - DNA, 22 bp, Artificial Sequence
  chemically synthesized
tcagaacctcccctgaccctgt

SEQ ID NO: 45030 - DNA, 22 bp, Artificial Sequence
  chemically synthesized
cagaacctcccctgaccctgta

SEQ ID NO: 45031 - DNA, 22 bp, Artificial Sequence
  chemically synthesized
agaacctcccctgaccctgtat

SEQ ID NO: 45032 - DNA, 22 bp, Artificial Sequence
  chemically synthesized
ccctgaccctgtattccctaga

SEQ ID NO: 45033 - DNA, 22 bp, Artificial Sequence
  chemically synthesized
accctgtattccctagaagtct

SEQ ID NO: 45034 - DNA, 22 bp, Artificial Sequence
  chemically synthesized
tattccctagaagtctcgctgc

SEQ ID NO: 45035 - DNA, 22 bp, Artificial Sequence
  chemically synthesized
cctagaagtctcgctgctttca

SEQ ID NO: 45036 - DNA, 22 bp, Artificial Sequence
  chemically synthesized
gaagtctcgctgctttcagagc

SEQ ID NO: 45037 - DNA, 22 bp, Artificial Sequence
  chemically synthesized
gctgctttcagagccaggcttc

SEQ ID NO: 45038 - DNA, 22 bp, Artificial Sequence
  chemically synthesized
ctttcagagccaggcttctctc

SEQ ID NO: 45039 - DNA, 22 bp, Artificial Sequence
  chemically synthesized
tcagagccaggcttctctcctg

SEQ ID NO: 45040 - DNA, 22 bp, Artificial Sequence
  chemically synthesized
cagagccaggcttctctcctgc

SEQ ID NO: 45041 - DNA, 22 bp, Artificial Sequence
  chemically synthesized
agagccaggcttctctcctgct

SEQ ID NO: 45042 - DNA, 22 bp, Artificial Sequence
  chemically synthesized
ctctcctgctgccacccccact

SEQ ID NO: 45043 - DNA, 22 bp, Artificial Sequence
  chemically synthesized
tctcctgctgccacccccactg

SEQ ID NO: 45044 - DNA, 22 bp, Artificial Sequence
  chemically synthesized
tcctgctgccacccccactgct

SEQ ID NO: 45045 - DNA, 22 bp, Artificial Sequence
  chemically synthesized
ctgctgccacccccactgctct

SEQ ID NO: 45046 - DNA, 22 bp, Artificial Sequence
  chemically synthesized
ctgccacccccactgctcttct

SEQ ID NO: 45047 - DNA, 22 bp, Artificial Sequence
  chemically synthesized
ccacccccactgctcttctagt

SEQ ID NO: 45048 - DNA, 22 bp, Artificial Sequence
  chemically synthesized
ctcttctagtcactctttaacc

SEQ ID NO: 45049 - DNA, 22 bp, Artificial Sequence
  chemically synthesized
ttctagtcactctttaacccac

SEQ ID NO: 45050 - DNA, 22 bp, Artificial Sequence
  chemically synthesized
ctagtcactctttaacccactc

SEQ ID NO: 45051 - DNA, 22 bp, Artificial Sequence
  chemically synthesized
tagtcactctttaacccactcc

SEQ ID NO: 45052 - DNA, 22 bp, Artificial Sequence
  chemically synthesized
gtcactctttaacccactccat

SEQ ID NO: 45053 - DNA, 22 bp, Artificial Sequence
  chemically synthesized
tttaacccactccatctgcatg

SEQ ID NO: 45054 - DNA, 22 bp, Artificial Sequence
  chemically synthesized
taacccactccatctgcatgtg

SEQ ID NO: 45055 - DNA, 22 bp, Artificial Sequence
  chemically synthesized
aacccactccatctgcatgtgg

SEQ ID NO: 45056 - DNA, 22 bp, Artificial Sequence
  chemically synthesized
acccactccatctgcatgtggc

SEQ ID NO: 45057 - DNA, 22 bp, Artificial Sequence
  chemically synthesized
catctgcatgtggcccccacca

SEQ ID NO: 45058 - DNA, 22 bp, Artificial Sequence
  chemically synthesized
catgtggcccccaccacacccc

SEQ ID NO: 45059 - DNA, 22 bp, Artificial Sequence
  chemically synthesized
aaagtggtcaaggttgtcctgt

SEQ ID NO: 45060 - DNA, 22 bp, Artificial Sequence
  chemically synthesized
tcctgttgcttaattccatgga

SEQ ID NO: 45061 - DNA, 22 bp, Artificial Sequence
  chemically synthesized
ttgcttaattccatggaagctt

SEQ ID NO: 45062 - DNA, 22 bp, Artificial Sequence
  chemically synthesized
cttaattccatggaagcttggc

SEQ ID NO: 45063 - DNA, 22 bp, Artificial Sequence
  chemically synthesized
aattccatggaagcttggctat

SEQ ID NO: 45064 - DNA, 22 bp, Artificial Sequence
  chemically synthesized
attccatggaagcttggctatc

SEQ ID NO: 45065 - DNA, 22 bp, Artificial Sequence
  chemically synthesized
catggaagcttggctatcttca

SEQ ID NO: 45066 - DNA, 22 bp, Artificial Sequence
  chemically synthesized
ggctatcttcattttattagcc

SEQ ID NO: 45067 - DNA, 22 bp, Artificial Sequence
  chemically synthesized
gctatcttcattttattagcct

SEQ ID NO: 45068 - DNA, 22 bp, Artificial Sequence
  chemically synthesized
tcttcattttattagcctcttt

SEQ ID NO: 45069 - DNA, 22 bp, Artificial Sequence
  chemically synthesized
cattttattagcctcttttggc

SEQ ID NO: 45070 - DNA, 22 bp, Artificial Sequence
  chemically synthesized
attttattagcctcttttggcc

SEQ ID NO: 45071 - DNA, 22 bp, Artificial Sequence
  chemically synthesized
tattagcctcttttggcctctc

SEQ ID NO: 45072 - DNA, 22 bp, Artificial Sequence
  chemically synthesized
attagcctcttttggcctctca

SEQ ID NO: 45073 - DNA, 22 bp, Artificial Sequence
  chemically synthesized
ttagcctcttttggcctctcac

SEQ ID NO: 45074 - DNA, 22 bp, Artificial Sequence
  chemically synthesized
gcctcttttggcctctcaccct

SEQ ID NO: 45075 - DNA, 22 bp, Artificial Sequence
  chemically synthesized
ttttggcctctcaccctgtgaa

SEQ ID NO: 45076 - DNA, 22 bp, Artificial Sequence
  chemically synthesized
ttggcctctcaccctgtgaaaa

SEQ ID NO: 45077 - DNA, 22 bp, Artificial Sequence
  chemically synthesized
tggcctctcaccctgtgaaaat

SEQ ID NO: 45078 - DNA, 22 bp, Artificial Sequence
  chemically synthesized
ggcctctcaccctgtgaaaatc

SEQ ID NO: 45079 - DNA, 22 bp, Artificial Sequence
  chemically synthesized
gcctctcaccctgtgaaaatca

SEQ ID NO: 45080 - DNA, 22 bp, Artificial Sequence
  chemically synthesized
tcaccctgtgaaaatcactaca

SEQ ID NO: 45081 - DNA, 22 bp, Artificial Sequence
  chemically synthesized
accctgtgaaaatcactacatt

SEQ ID NO: 45082 - DNA, 22 bp, Artificial Sequence
  chemically synthesized
tgaaaatcactacattttgtgc

SEQ ID NO: 45083 - DNA, 22 bp, Artificial Sequence
  chemically synthesized
cattttgtgccagagatggagc

SEQ ID NO: 45084 - DNA, 22 bp, Artificial Sequence
  chemically synthesized
tgtgccagagatggagctggca

SEQ ID NO: 45085 - DNA, 22 bp, Artificial Sequence
  chemically synthesized
gtgccagagatggagctggcat

SEQ ID NO: 45086 - DNA, 22 bp, Artificial Sequence
  chemically synthesized
tgccagagatggagctggcatc

SEQ ID NO: 45087 - DNA, 22 bp, Artificial Sequence
  chemically synthesized
gcatctccaggcttggaagagg

SEQ ID NO: 45088 - DNA, 22 bp, Artificial Sequence
  chemically synthesized
caggcttggaagagggctgctg

SEQ ID NO: 45089 - DNA, 22 bp, Artificial Sequence
  chemically synthesized
ggaagagggctgctgaagctca

SEQ ID NO: 45090 - DNA, 22 bp, Artificial Sequence
  chemically synthesized
gaagagggctgctgaagctcag

SEQ ID NO: 45091 - DNA, 22 bp, Artificial Sequence
  chemically synthesized
ctgaagctcagccaggtgtcct

SEQ ID NO: 45092 - DNA, 22 bp, Artificial Sequence
  chemically synthesized
aagctcagccaggtgtcctaag

SEQ ID NO: 45093 - DNA, 22 bp, Artificial Sequence
  chemically synthesized
agccaggtgtcctaaggagcct

SEQ ID NO: 45094 - DNA, 22 bp, Artificial Sequence
  chemically synthesized
aggagcctcaggacaggggatg

SEQ ID NO: 45095 - DNA, 22 bp, Artificial Sequence
  chemically synthesized
aggacaggggatgctcagtagc

SEQ ID NO: 45096 - DNA, 22 bp, Artificial Sequence
  chemically synthesized
agtagccttgcaatgggaacac

SEQ ID NO: 45097 - DNA, 22 bp, Artificial Sequence
  chemically synthesized
gcaatgggaacacagctgagcc

SEQ ID NO: 45098 - DNA, 22 bp, Artificial Sequence
  chemically synthesized
caatgggaacacagctgagccc

SEQ ID NO: 45099 - DNA, 22 bp, Artificial Sequence
  chemically synthesized
agccccacttggccaccctttg

SEQ ID NO: 45100 - DNA, 22 bp, Artificial Sequence
  chemically synthesized
ggccaccctttgccacaaccag

SEQ ID NO: 45101 - DNA, 22 bp, Artificial Sequence
  chemically synthesized
gccaccctttgccacaaccagg

SEQ ID NO: 45102 - DNA, 22 bp, Artificial Sequence
  chemically synthesized
tgccacaaccaggcagaaagca

SEQ ID NO: 45103 - DNA, 22 bp, Artificial Sequence
  chemically synthesized
gccacaaccaggcagaaagcag

SEQ ID NO: 45104 - DNA, 22 bp, Artificial Sequence
  chemically synthesized
ccacaaccaggcagaaagcagc

SEQ ID NO: 45105 - DNA, 22 bp, Artificial Sequence
  chemically synthesized
ttgaacagatttgttgcctcag

SEQ ID NO: 45106 - DNA, 22 bp, Artificial Sequence
  chemically synthesized
tgaacagatttgttgcctcaga

SEQ ID NO: 45107 - DNA, 22 bp, Artificial Sequence
  chemically synthesized
gaacagatttgttgcctcagat

SEQ ID NO: 45108 - DNA, 22 bp, Artificial Sequence
  chemically synthesized
aacagatttgttgcctcagatt

SEQ ID NO: 45109 - DNA, 22 bp, Artificial Sequence
  chemically synthesized
gttgcctcagatttgatctcaa

SEQ ID NO: 45110 - DNA, 22 bp, Artificial Sequence
  chemically synthesized
ttgcctcagatttgatctcaaa

SEQ ID NO: 45111 - DNA, 22 bp, Artificial Sequence
  chemically synthesized
cctcagatttgatctcaaagaa

SEQ ID NO: 45112 - DNA, 22 bp, Artificial Sequence
  chemically synthesized
agatttgatctcaaagaaaaat

SEQ ID NO: 45113 - DNA, 22 bp, Artificial Sequence
  chemically synthesized
gatctcaaagaaaaatcgtggg

SEQ ID NO: 45114 - DNA, 22 bp, Artificial Sequence
  chemically synthesized
atctcaaagaaaaatcgtgggc

SEQ ID NO: 45115 - DNA, 22 bp, Artificial Sequence
  chemically synthesized
aaagaaaaatcgtgggcagtat

SEQ ID NO: 45116 - DNA, 22 bp, Artificial Sequence
  chemically synthesized
gtcccaggttctgcttttttac

SEQ ID NO: 45117 - DNA, 22 bp, Artificial Sequence
  chemically synthesized
tgcttttttacaatttcctctg

SEQ ID NO: 45118 - DNA, 22 bp, Artificial Sequence
  chemically synthesized
cttttttacaatttcctctgaa

SEQ ID NO: 45119 - DNA, 22 bp, Artificial Sequence
  chemically synthesized
ttttacaatttcctctgaaatc

SEQ ID NO: 45120 - DNA, 22 bp, Artificial Sequence
  chemically synthesized
tttacaatttcctctgaaatct

SEQ ID NO: 45121 - DNA, 22 bp, Artificial Sequence
  chemically synthesized
ttacaatttcctctgaaatctg

SEQ ID NO: 45122 - DNA, 22 bp, Artificial Sequence
  chemically synthesized
tacaatttcctctgaaatctgg

SEQ ID NO: 45123 - DNA, 22 bp, Artificial Sequence
  chemically synthesized
acaatttcctctgaaatctgga

SEQ ID NO: 45124 - DNA, 22 bp, Artificial Sequence
  chemically synthesized
caatttcctctgaaatctggat

SEQ ID NO: 45125 - DNA, 22 bp, Artificial Sequence
  chemically synthesized
cctctgaaatctggatgcctat

SEQ ID NO: 45126 - DNA, 22 bp, Artificial Sequence
  chemically synthesized
ctctgaaatctggatgcctatc

SEQ ID NO: 45127 - DNA, 22 bp, Artificial Sequence
  chemically synthesized
tgaaatctggatgcctatcaac

SEQ ID NO: 45128 - DNA, 22 bp, Artificial Sequence
  chemically synthesized
aaatctggatgcctatcaacac

SEQ ID NO: 45129 - DNA, 22 bp, Artificial Sequence
  chemically synthesized
gatgcctatcaacaccttggaa

SEQ ID NO: 45130 - DNA, 22 bp, Artificial Sequence
  chemically synthesized
tcaacaccttggaaaaactgaa

SEQ ID NO: 45131 - DNA, 22 bp, Artificial Sequence
  chemically synthesized
ggaaaaactgaattctccccaa

SEQ ID NO: 45132 - DNA, 22 bp, Artificial Sequence
  chemically synthesized
gaaaaactgaattctccccaac

SEQ ID NO: 45133 - DNA, 22 bp, Artificial Sequence
  chemically synthesized
aattctccccaactaatagtgg

SEQ ID NO: 45134 - DNA, 22 bp, Artificial Sequence
  chemically synthesized
tccccaactaatagtggtgtgt

SEQ ID NO: 45135 - DNA, 22 bp, Artificial Sequence
  chemically synthesized
cccaactaatagtggtgtgtca

SEQ ID NO: 45136 - DNA, 22 bp, Artificial Sequence
  chemically synthesized
atagtggtgtgtcactgtagta

SEQ ID NO: 45137 - DNA, 22 bp, Artificial Sequence
  chemically synthesized
tagtaagcctagtacaaaaatg

SEQ ID NO: 45138 - DNA, 22 bp, Artificial Sequence
  chemically synthesized
gtacaaaaatggccttctttgt

SEQ ID NO: 45139 - DNA, 22 bp, Artificial Sequence
  chemically synthesized
ctttgtggaggagcttcatatc

SEQ ID NO: 45140 - DNA, 22 bp, Artificial Sequence
  chemically synthesized
tttgtggaggagcttcatatcc

SEQ ID NO: 45141 - DNA, 22 bp, Artificial Sequence
  chemically synthesized
tgtggaggagcttcatatcctc

SEQ ID NO: 45142 - DNA, 22 bp, Artificial Sequence
  chemically synthesized
gtggaggagcttcatatcctcc

SEQ ID NO: 45143 - DNA, 22 bp, Artificial Sequence
  chemically synthesized
tggaggagcttcatatcctcca

SEQ ID NO: 45144 - DNA, 22 bp, Artificial Sequence
  chemically synthesized
catatcctccattttttttttg

SEQ ID NO: 45145 - DNA, 22 bp, Artificial Sequence
  chemically synthesized
atatcctccattttttttttgc

SEQ ID NO: 45146 - DNA, 22 bp, Artificial Sequence
  chemically synthesized
cattttttttttgcttaatttt

SEQ ID NO: 45147 - DNA, 22 bp, Artificial Sequence
  chemically synthesized
tttttttgcttaatttttgccc

SEQ ID NO: 45148 - DNA, 22 bp, Artificial Sequence
  chemically synthesized
ttttttgcttaatttttgccca

SEQ ID NO: 45149 - DNA, 22 bp, Artificial Sequence
  chemically synthesized
tttttgcttaatttttgcccaa

SEQ ID NO: 45150 - DNA, 22 bp, Artificial Sequence
  chemically synthesized
ttttgcttaatttttgcccaag

SEQ ID NO: 45151 - DNA, 22 bp, Artificial Sequence
  chemically synthesized
tttgcttaatttttgcccaaga

SEQ ID NO: 45152 - DNA, 22 bp, Artificial Sequence
  chemically synthesized
ttgcttaatttttgcccaagat

SEQ ID NO: 45153 - DNA, 22 bp, Artificial Sequence
  chemically synthesized
tgcttaatttttgcccaagatg

SEQ ID NO: 45154 - DNA, 22 bp, Artificial Sequence
  chemically synthesized
gcttaatttttgcccaagatga

SEQ ID NO: 45155 - DNA, 22 bp, Artificial Sequence
  chemically synthesized
cttaatttttgcccaagatgag

SEQ ID NO: 45156 - DNA, 22 bp, Artificial Sequence
  chemically synthesized
aatttttgcccaagatgagaac

SEQ ID NO: 45157 - DNA, 22 bp, Artificial Sequence
  chemically synthesized
atttttgcccaagatgagaaca

SEQ ID NO: 45158 - DNA, 22 bp, Artificial Sequence
  chemically synthesized
ttgcccaagatgagaacataat

SEQ ID NO: 45159 - DNA, 22 bp, Artificial Sequence
  chemically synthesized
tgcccaagatgagaacataatt

SEQ ID NO: 45160 - DNA, 22 bp, Artificial Sequence
  chemically synthesized
gcccaagatgagaacataattt

SEQ ID NO: 45161 - DNA, 22 bp, Artificial Sequence
  chemically synthesized
cccaagatgagaacataattta

SEQ ID NO: 45162 - DNA, 22 bp, Artificial Sequence
  chemically synthesized
agttcactttttatttattccc

SEQ ID NO: 45163 - DNA, 22 bp, Artificial Sequence
  chemically synthesized
gttcactttttatttattccca

SEQ ID NO: 45164 - DNA, 22 bp, Artificial Sequence
  chemically synthesized
actttttatttattcccaacat

SEQ ID NO: 45165 - DNA, 22 bp, Artificial Sequence
  chemically synthesized
tttatttattcccaacatcatc

SEQ ID NO: 45166 - DNA, 22 bp, Artificial Sequence
  chemically synthesized
ttatttattcccaacatcatcc

SEQ ID NO: 45167 - DNA, 22 bp, Artificial Sequence
  chemically synthesized
tatttattcccaacatcatcca

SEQ ID NO: 45168 - DNA, 22 bp, Artificial Sequence
  chemically synthesized
atttattcccaacatcatccat

SEQ ID NO: 45169 - DNA, 22 bp, Artificial Sequence
  chemically synthesized
tttattcccaacatcatccatg

SEQ ID NO: 45170 - DNA, 22 bp, Artificial Sequence
  chemically synthesized
attcccaacatcatccatgcac

SEQ ID NO: 45171 - DNA, 22 bp, Artificial Sequence
  chemically synthesized
ttcccaacatcatccatgcacc

SEQ ID NO: 45172 - DNA, 22 bp, Artificial Sequence
  chemically synthesized
ccaacatcatccatgcaccaac

SEQ ID NO: 45173 - DNA, 22 bp, Artificial Sequence
  chemically synthesized
ttgtaactaaaggagggaccat

SEQ ID NO: 45174 - DNA, 22 bp, Artificial Sequence
  chemically synthesized
tgtaactaaaggagggaccatt

SEQ ID NO: 45175 - DNA, 22 bp, Artificial Sequence
  chemically synthesized
gtaactaaaggagggaccattc

SEQ ID NO: 45176 - DNA, 22 bp, Artificial Sequence
  chemically synthesized
taactaaaggagggaccattca

SEQ ID NO: 45177 - DNA, 22 bp, Artificial Sequence
  chemically synthesized
aaggagggaccattcagaagat

SEQ ID NO: 45178 - DNA, 22 bp, Artificial Sequence
  chemically synthesized
agaagatgcttatcaactgtca

SEQ ID NO: 45179 - DNA, 22 bp, Artificial Sequence
  chemically synthesized
atcaactgtcaaagtgacagtg

SEQ ID NO: 45180 - DNA, 22 bp, Artificial Sequence
  chemically synthesized
tcaactgtcaaagtgacagtgt

SEQ ID NO: 45181 - DNA, 22 bp, Artificial Sequence
  chemically synthesized
tcaaagtgacagtgttacaacc

SEQ ID NO: 45182 - DNA, 22 bp, Artificial Sequence
  chemically synthesized
caaccaatgcacatattgtaag

SEQ ID NO: 45183 - DNA, 22 bp, Artificial Sequence
  chemically synthesized
taagaaatcaaacaatggcctc

SEQ ID NO: 45184 - DNA, 22 bp, Artificial Sequence
  chemically synthesized
caaggttcatttctacacaggg

SEQ ID NO: 45185 - DNA, 22 bp, Artificial Sequence
  chemically synthesized
atttctacacagggattagcag

SEQ ID NO: 45186 - DNA, 22 bp, Artificial Sequence
  chemically synthesized
ctacacagggattagcagatca

SEQ ID NO: 45187 - DNA, 22 bp, Artificial Sequence
  chemically synthesized
tacacagggattagcagatcaa

SEQ ID NO: 45188 - DNA, 22 bp, Artificial Sequence
  chemically synthesized
cacagggattagcagatcaaca

SEQ ID NO: 45189 - DNA, 22 bp, Artificial Sequence
  chemically synthesized
gcagatcaacatcaatcttggc

SEQ ID NO: 45190 - DNA, 22 bp, Artificial Sequence
  chemically synthesized
ggcaacacagttgccactgatg

SEQ ID NO: 45191 - DNA, 22 bp, Artificial Sequence
  chemically synthesized
gcaacacagttgccactgatgg

SEQ ID NO: 45192 - DNA, 22 bp, Artificial Sequence
  chemically synthesized
ccactgatggtgtcttattttt

SEQ ID NO: 45193 - DNA, 22 bp, Artificial Sequence
  chemically synthesized
atggtgtcttattttttttatc

SEQ ID NO: 45194 - DNA, 22 bp, Artificial Sequence
  chemically synthesized
attttttttatcatgacatggc

SEQ ID NO: 45195 - DNA, 22 bp, Artificial Sequence
  chemically synthesized
ttttttttatcatgacatggca

SEQ ID NO: 45196 - DNA, 22 bp, Artificial Sequence
  chemically synthesized
tttttatcatgacatggcaatc

SEQ ID NO: 45197 - DNA, 22 bp, Artificial Sequence
  chemically synthesized
ttttatcatgacatggcaatca

SEQ ID NO: 45198 - DNA, 22 bp, Artificial Sequence
  chemically synthesized
tttatcatgacatggcaatcaa

SEQ ID NO: 45199 - DNA, 22 bp, Artificial Sequence
  chemically synthesized
ttatcatgacatggcaatcaag

SEQ ID NO: 45200 - DNA, 22 bp, Artificial Sequence
  chemically synthesized
tatcatgacatggcaatcaaga

SEQ ID NO: 45201 - DNA, 22 bp, Artificial Sequence
  chemically synthesized
atcatgacatggcaatcaagag

SEQ ID NO: 45202 - DNA, 22 bp, Artificial Sequence
  chemically synthesized
tcatgacatggcaatcaagagc

SEQ ID NO: 45203 - DNA, 22 bp, Artificial Sequence
  chemically synthesized
attcttatttaagattttatgg

SEQ ID NO: 45204 - DNA, 22 bp, Artificial Sequence
  chemically synthesized
ttcttatttaagattttatggt

SEQ ID NO: 45205 - DNA, 22 bp, Artificial Sequence
  chemically synthesized
ttatttaagattttatggttag

SEQ ID NO: 45206 - DNA, 22 bp, Artificial Sequence
  chemically synthesized
atttaagattttatggttagac

SEQ ID NO: 45207 - DNA, 22 bp, Artificial Sequence
  chemically synthesized
tttaagattttatggttagact

SEQ ID NO: 45208 - DNA, 22 bp, Artificial Sequence
  chemically synthesized
aagattttatggttagactagg

SEQ ID NO: 45209 - DNA, 22 bp, Artificial Sequence
  chemically synthesized
agattttatggttagactaggc

SEQ ID NO: 45210 - DNA, 22 bp, Artificial Sequence
  chemically synthesized
tatggttagactaggcagatag

SEQ ID NO: 45211 - DNA, 22 bp, Artificial Sequence
  chemically synthesized
atggttagactaggcagatagc

SEQ ID NO: 45212 - DNA, 22 bp, Artificial Sequence
  chemically synthesized
tggttagactaggcagatagct

SEQ ID NO: 45213 - DNA, 22 bp, Artificial Sequence
  chemically synthesized
gactaggcagatagctagatat

SEQ ID NO: 45214 - DNA, 22 bp, Artificial Sequence
  chemically synthesized
ggcagatagctagatatgagca

SEQ ID NO: 45215 - DNA, 22 bp, Artificial Sequence
  chemically synthesized
gatatgagcaggaggtggaagc

SEQ ID NO: 45216 - DNA, 22 bp, Artificial Sequence
  chemically synthesized
agagaatggaggtctggagaat

SEQ ID NO: 45217 - DNA, 22 bp, Artificial Sequence
  chemically synthesized
gagaatctgaaaccccagagat

SEQ ID NO: 45218 - DNA, 22 bp, Artificial Sequence
  chemically synthesized
aaaccccagagattacccaagt

SEQ ID NO: 45219 - DNA, 22 bp, Artificial Sequence
  chemically synthesized
cccaagtcctgcatgctagaca

SEQ ID NO: 45220 - DNA, 22 bp, Artificial Sequence
  chemically synthesized
catgctagacatgagtggagga

SEQ ID NO: 45221 - DNA, 22 bp, Artificial Sequence
  chemically synthesized
gacatgagtggaggagggggaa

SEQ ID NO: 45222 - DNA, 22 bp, Artificial Sequence
  chemically synthesized
ggtagaaaagaatgccccttaa

SEQ ID NO: 45223 - DNA, 22 bp, Artificial Sequence
  chemically synthesized
aagatgcccagcagtcgctcac

SEQ ID NO: 45224 - DNA, 22 bp, Artificial Sequence
  chemically synthesized
agatgcccagcagtcgctcact

SEQ ID NO: 45225 - DNA, 22 bp, Artificial Sequence
  chemically synthesized
actgtgcagttaacttttcaga

SEQ ID NO: 45226 - DNA, 22 bp, Artificial Sequence
  chemically synthesized
tgcagttaacttttcagaatgc

SEQ ID NO: 45227 - DNA, 22 bp, Artificial Sequence
  chemically synthesized
acttttcagaatgctgctagat

SEQ ID NO: 45228 - DNA, 22 bp, Artificial Sequence
  chemically synthesized
ttcagaatgctgctagatacat

SEQ ID NO: 45229 - DNA, 22 bp, Artificial Sequence
  chemically synthesized
tcagaatgctgctagatacatg

SEQ ID NO: 45230 - DNA, 22 bp, Artificial Sequence
  chemically synthesized
cagaatgctgctagatacatgc

SEQ ID NO: 45231 - DNA, 22 bp, Artificial Sequence
  chemically synthesized
agaatgctgctagatacatgct

SEQ ID NO: 45232 - DNA, 22 bp, Artificial Sequence
  chemically synthesized
ctagatacatgctgatagggag

SEQ ID NO: 45233 - DNA, 22 bp, Artificial Sequence
  chemically synthesized
gatacatgctgatagggaggga

SEQ ID NO: 45234 - DNA, 22 bp, Artificial Sequence
  chemically synthesized
atagggagggaagagggcaaag

SEQ ID NO: 45235 - DNA, 22 bp, Artificial Sequence
  chemically synthesized
ctaagagatacacggttgcagt

SEQ ID NO: 45236 - DNA, 22 bp, Artificial Sequence
  chemically synthesized
agagatacacggttgcagttag

SEQ ID NO: 45237 - DNA, 22 bp, Artificial Sequence
  chemically synthesized
cagttagtatacatctgagtgc

SEQ ID NO: 45238 - DNA, 22 bp, Artificial Sequence
  chemically synthesized
gtatacatctgagtgctataca

SEQ ID NO: 45239 - DNA, 22 bp, Artificial Sequence
  chemically synthesized
agtgctatacaaccttctttgg

SEQ ID NO: 45240 - DNA, 22 bp, Artificial Sequence
  chemically synthesized
tacaaccttctttgggtggtgg

SEQ ID NO: 45241 - DNA, 22 bp, Artificial Sequence
  chemically synthesized
ctttgggtggtggcaagaagca

SEQ ID NO: 45242 - DNA, 22 bp, Artificial Sequence
  chemically synthesized
tttgggtggtggcaagaagcaa

SEQ ID NO: 45243 - DNA, 22 bp, Artificial Sequence
  chemically synthesized
tgggtggtggcaagaagcaatg

SEQ ID NO: 45244 - DNA, 22 bp, Artificial Sequence
  chemically synthesized
gggtggtggcaagaagcaatgc

SEQ ID NO: 45245 - DNA, 22 bp, Artificial Sequence
  chemically synthesized
ggtggtggcaagaagcaatgca

SEQ ID NO: 45246 - DNA, 22 bp, Artificial Sequence
  chemically synthesized
cgtagaattcatatcaaacacc

SEQ ID NO: 45247 - DNA, 22 bp, Artificial Sequence
  chemically synthesized
atatcaaacacctgtatcacag

SEQ ID NO: 45248 - DNA, 22 bp, Artificial Sequence
  chemically synthesized
tatcacaggtgttaaagaaaca

SEQ ID NO: 45249 - DNA, 22 bp, Artificial Sequence
  chemically synthesized
aagaaacaagaaacattgtact

SEQ ID NO: 45250 - DNA, 22 bp, Artificial Sequence
  chemically synthesized
tacttcttgtattcttaataat

SEQ ID NO: 45251 - DNA, 22 bp, Artificial Sequence
  chemically synthesized
cttgtattcttaataatgattt

SEQ ID NO: 45252 - DNA, 22 bp, Artificial Sequence
  chemically synthesized
ttgtattcttaataatgatttg

SEQ ID NO: 45253 - DNA, 22 bp, Artificial Sequence
  chemically synthesized
gtattcttaataatgatttgca

SEQ ID NO: 45254 - DNA, 22 bp, Artificial Sequence
  chemically synthesized
tattcttaataatgatttgcaa

SEQ ID NO: 45255 - DNA, 22 bp, Artificial Sequence
  chemically synthesized
ttaataatgatttgcaatattg

SEQ ID NO: 45256 - DNA, 22 bp, Artificial Sequence
  chemically synthesized
aataatgatttgcaatattgtc

SEQ ID NO: 45257 - DNA, 22 bp, Artificial Sequence
  chemically synthesized
ataatgatttgcaatattgtct

SEQ ID NO: 45258 - DNA, 22 bp, Artificial Sequence
  chemically synthesized
gcaatattgtctttagtatcac

SEQ ID NO: 45259 - DNA, 22 bp, Artificial Sequence
  chemically synthesized
caatattgtctttagtatcact

SEQ ID NO: 45260 - DNA, 22 bp, Artificial Sequence
  chemically synthesized
tctttagtatcactgcaaacct

SEQ ID NO: 45261 - DNA, 22 bp, Artificial Sequence
  chemically synthesized
tagtatcactgcaaacctctat

SEQ ID NO: 45262 - DNA, 22 bp, Artificial Sequence
  chemically synthesized
agtatcactgcaaacctctata

SEQ ID NO: 45263 - DNA, 22 bp, Artificial Sequence
  chemically synthesized
gtatcactgcaaacctctataa

SEQ ID NO: 45264 - DNA, 22 bp, Artificial Sequence
  chemically synthesized
caaacctctataaatatgattt

SEQ ID NO: 45265 - DNA, 22 bp, Artificial Sequence
  chemically synthesized
tataaatatgatttttaaaaag

SEQ ID NO: 45266 - DNA, 22 bp, Artificial Sequence
  chemically synthesized
taaatatgatttttaaaaagta

SEQ ID NO: 45267 - DNA, 22 bp, Artificial Sequence
  chemically synthesized
ttaaaaagtatttctttaggtt

SEQ ID NO: 45268 - DNA, 22 bp, Artificial Sequence
  chemically synthesized
taaaaagtatttctttaggttg

SEQ ID NO: 45269 - DNA, 22 bp, Artificial Sequence
  chemically synthesized
aaaaagtatttctttaggttgg

SEQ ID NO: 45270 - DNA, 22 bp, Artificial Sequence
  chemically synthesized
aaaagtatttctttaggttgga

SEQ ID NO: 45271 - DNA, 22 bp, Artificial Sequence
  chemically synthesized
ctttaggttggaattacttcta

SEQ ID NO: 45272 - DNA, 22 bp, Artificial Sequence
  chemically synthesized
tttaggttggaattacttctac

SEQ ID NO: 45273 - DNA, 22 bp, Artificial Sequence
  chemically synthesized
taggttggaattacttctacgc

SEQ ID NO: 45274 - DNA, 22 bp, Artificial Sequence
  chemically synthesized
aggttggaattacttctacgca

SEQ ID NO: 45275 - DNA, 22 bp, Artificial Sequence
  chemically synthesized
ggttggaattacttctacgcat

SEQ ID NO: 45276 - DNA, 22 bp, Artificial Sequence
  chemically synthesized
gaattacttctacgcattgact

SEQ ID NO: 45277 - DNA, 22 bp, Artificial Sequence
  chemically synthesized
cttctacgcattgacttatctt

SEQ ID NO: 45278 - DNA, 22 bp, Artificial Sequence
  chemically synthesized
ctacgcattgacttatcttcct

SEQ ID NO: 45279 - DNA, 22 bp, Artificial Sequence
  chemically synthesized
tacgcattgacttatcttcctg

SEQ ID NO: 45280 - DNA, 22 bp, Artificial Sequence
  chemically synthesized
cgcattgacttatcttcctggg

SEQ ID NO: 45281 - DNA, 22 bp, Artificial Sequence
  chemically synthesized
acttatcttcctgggtttcatt

SEQ ID NO: 45282 - DNA, 22 bp, Artificial Sequence
  chemically synthesized
atcttcctgggtttcattagcc

SEQ ID NO: 45283 - DNA, 22 bp, Artificial Sequence
  chemically synthesized
tcttcctgggtttcattagccg

SEQ ID NO: 45284 - DNA, 22 bp, Artificial Sequence
  chemically synthesized
cctgggtttcattagccgtacc

SEQ ID NO: 45285 - DNA, 22 bp, Artificial Sequence
  chemically synthesized
ctgggtttcattagccgtaccc

SEQ ID NO: 45286 - DNA, 22 bp, Artificial Sequence
  chemically synthesized
ggtttcattagccgtacccgtt

SEQ ID NO: 45287 - DNA, 22 bp, Artificial Sequence
  chemically synthesized
cattagccgtacccgttgtact

SEQ ID NO: 45288 - DNA, 22 bp, Artificial Sequence
  chemically synthesized
attagccgtacccgttgtactt

SEQ ID NO: 45289 - DNA, 22 bp, Artificial Sequence
  chemically synthesized
gccgtacccgttgtactttctt

SEQ ID NO: 45290 - DNA, 22 bp, Artificial Sequence
  chemically synthesized
tactttcttccttaccactgtt

SEQ ID NO: 45291 - DNA, 22 bp, Artificial Sequence
  chemically synthesized
tcttccttaccactgtttatct

SEQ ID NO: 45292 - DNA, 22 bp, Artificial Sequence
  chemically synthesized
cttccttaccactgtttatctc

SEQ ID NO: 45293 - DNA, 22 bp, Artificial Sequence
  chemically synthesized
ttccttaccactgtttatctca

SEQ ID NO: 45294 - DNA, 22 bp, Artificial Sequence
  chemically synthesized
ccttaccactgtttatctcaaa

SEQ ID NO: 45295 - DNA, 22 bp, Artificial Sequence
  chemically synthesized
cttaccactgtttatctcaaac

SEQ ID NO: 45296 - DNA, 22 bp, Artificial Sequence
  chemically synthesized
accactgtttatctcaaactct

SEQ ID NO: 45297 - DNA, 22 bp, Artificial Sequence
  chemically synthesized
ccactgtttatctcaaactctt

SEQ ID NO: 45298 - DNA, 22 bp, Artificial Sequence
  chemically synthesized
tttatctcaaactcttgagatt

SEQ ID NO: 45299 - DNA, 22 bp, Artificial Sequence
  chemically synthesized
atctcaaactcttgagattaaa

SEQ ID NO: 45300 - DNA, 22 bp, Artificial Sequence
  chemically synthesized
tctcaaactcttgagattaaag

SEQ ID NO: 45301 - DNA, 22 bp, Artificial Sequence
  chemically synthesized
aaactcttgagattaaagtatg

SEQ ID NO: 45302 - DNA, 22 bp, Artificial Sequence
  chemically synthesized
ttgagattaaagtatgggctca

SEQ ID NO: 45303 - DNA, 22 bp, Artificial Sequence
  chemically synthesized
gagattaaagtatgggctcagg

SEQ ID NO: 45304 - DNA, 22 bp, Artificial Sequence
  chemically synthesized
agattaaagtatgggctcagga

SEQ ID NO: 45305 - DNA, 22 bp, Artificial Sequence
  chemically synthesized
aagtatgggctcaggagggagc

SEQ ID NO: 45306 - DNA, 22 bp, Artificial Sequence
  chemically synthesized
aggagggagcgaggagcttcag

SEQ ID NO: 45307 - DNA, 22 bp, Artificial Sequence
  chemically synthesized
caggactctcacggacctccag

SEQ ID NO: 45308 - DNA, 22 bp, Artificial Sequence
  chemically synthesized
aggactctcacggacctccagc

SEQ ID NO: 45309 - DNA, 22 bp, Artificial Sequence
  chemically synthesized
tcacggacctccagcacagtgt

SEQ ID NO: 45310 - DNA, 22 bp, Artificial Sequence
  chemically synthesized
acggacctccagcacagtgtag

SEQ ID NO: 45311 - DNA, 22 bp, Artificial Sequence
  chemically synthesized
cagcacagtgtagctgccttat

SEQ ID NO: 45312 - DNA, 22 bp, Artificial Sequence
  chemically synthesized
ccttatggaaaagtggccacac

SEQ ID NO: 45313 - DNA, 22 bp, Artificial Sequence
  chemically synthesized
atggaaaagtggccacactgtt

SEQ ID NO: 45314 - DNA, 22 bp, Artificial Sequence
  chemically synthesized
tggaaaagtggccacactgttt

SEQ ID NO: 45315 - DNA, 22 bp, Artificial Sequence
  chemically synthesized
ttttctgcactggtccctgccc

SEQ ID NO: 45316 - DNA, 22 bp, Artificial Sequence
  chemically synthesized
tctgcactggtccctgccccta

SEQ ID NO: 45317 - DNA, 22 bp, Artificial Sequence
  chemically synthesized
ctgcactggtccctgcccctac

SEQ ID NO: 45318 - DNA, 22 bp, Artificial Sequence
  chemically synthesized
tgcactggtccctgcccctact

SEQ ID NO: 45319 - DNA, 22 bp, Artificial Sequence
  chemically synthesized
cactggtccctgcccctactat

SEQ ID NO: 45320 - DNA, 22 bp, Artificial Sequence
  chemically synthesized
gtccctgcccctactattcctc

SEQ ID NO: 45321 - DNA, 22 bp, Artificial Sequence
  chemically synthesized
cccctactattcctcactgggc

SEQ ID NO: 45322 - DNA, 22 bp, Artificial Sequence
  chemically synthesized
ctattcctcactgggcagagca

SEQ ID NO: 45323 - DNA, 22 bp, Artificial Sequence
  chemically synthesized
ttcctcactgggcagagcacag

SEQ ID NO: 45324 - DNA, 22 bp, Artificial Sequence
  chemically synthesized
ctcactgggcagagcacagcca

SEQ ID NO: 45325 - DNA, 22 bp, Artificial Sequence
  chemically synthesized
actgggcagagcacagccaccc

SEQ ID NO: 45326 - DNA, 22 bp, Artificial Sequence
  chemically synthesized
ggcagagcacagccaccctggc

SEQ ID NO: 45327 - DNA, 22 bp, Artificial Sequence
  chemically synthesized
gccctgcctgaacattttagtc

SEQ ID NO: 45328 - DNA, 22 bp, Artificial Sequence
  chemically synthesized
cctgaacattttagtcagtgtt

SEQ ID NO: 45329 - DNA, 22 bp, Artificial Sequence
  chemically synthesized
aacattttagtcagtgttggct

SEQ ID NO: 45330 - DNA, 22 bp, Artificial Sequence
  chemically synthesized
tagtcagtgttggctctgtgct

SEQ ID NO: 45331 - DNA, 22 bp, Artificial Sequence
  chemically synthesized
agtcagtgttggctctgtgctt

SEQ ID NO: 45332 - DNA, 22 bp, Artificial Sequence
  chemically synthesized
gtcagtgttggctctgtgcttc

SEQ ID NO: 45333 - DNA, 22 bp, Artificial Sequence
  chemically synthesized
gctctgtgcttctctggggagg

SEQ ID NO: 45334 - DNA, 22 bp, Artificial Sequence
  chemically synthesized
tgtgcttctctggggaggaaat

SEQ ID NO: 45335 - DNA, 22 bp, Artificial Sequence
  chemically synthesized
tgcttctctggggaggaaatcc

SEQ ID NO: 45336 - DNA, 22 bp, Artificial Sequence
  chemically synthesized
ctctggggaggaaatccaagag

SEQ ID NO: 45337 - DNA, 22 bp, Artificial Sequence
  chemically synthesized
tctggggaggaaatccaagaga

SEQ ID NO: 45338 - DNA, 22 bp, Artificial Sequence
  chemically synthesized
tggggaggaaatccaagagaca

SEQ ID NO: 45339 - DNA, 22 bp, Artificial Sequence
  chemically synthesized
gggaggaaatccaagagacaac

SEQ ID NO: 45340 - DNA, 22 bp, Artificial Sequence
  chemically synthesized
tgccatttcagctgcagcagta

SEQ ID NO: 45341 - DNA, 22 bp, Artificial Sequence
  chemically synthesized
ccatttcagctgcagcagtacc

SEQ ID NO: 45342 - DNA, 22 bp, Artificial Sequence
  chemically synthesized
cagctgcagcagtaccaccgtt

SEQ ID NO: 45343 - DNA, 22 bp, Artificial Sequence
  chemically synthesized
agctgcagcagtaccaccgtta

SEQ ID NO: 45344 - DNA, 22 bp, Artificial Sequence
  chemically synthesized
cagcagtaccaccgttaatgcc

SEQ ID NO: 45345 - DNA, 22 bp, Artificial Sequence
  chemically synthesized
atgcccttgggcttgagaaaga

SEQ ID NO: 45346 - DNA, 22 bp, Artificial Sequence
  chemically synthesized
gggcttgagaaagaagggacct

SEQ ID NO: 45347 - DNA, 22 bp, Artificial Sequence
  chemically synthesized
ggcttgagaaagaagggacctg

SEQ ID NO: 45348 - DNA, 22 bp, Artificial Sequence
  chemically synthesized
gagaaagaagggacctggccac

SEQ ID NO: 45349 - DNA, 22 bp, Artificial Sequence
  chemically synthesized
agaaagaagggacctggccact

SEQ ID NO: 45350 - DNA, 22 bp, Artificial Sequence
  chemically synthesized
gccacttccctgacacctccag

SEQ ID NO: 45351 - DNA, 22 bp, Artificial Sequence
  chemically synthesized
ccctgacacctccagcacacag

SEQ ID NO: 45352 - DNA, 22 bp, Artificial Sequence
  chemically synthesized
cctgacacctccagcacacagc

SEQ ID NO: 45353 - DNA, 22 bp, Artificial Sequence
  chemically synthesized
acacctccagcacacagcaggg

SEQ ID NO: 45354 - DNA, 22 bp, Artificial Sequence
  chemically synthesized
cagcacacagcagggaaagaat

SEQ ID NO: 45355 - DNA, 22 bp, Artificial Sequence
  chemically synthesized
cagtttctctttcttgtgagct

SEQ ID NO: 45356 - DNA, 22 bp, Artificial Sequence
  chemically synthesized
ctctttcttgtgagctttcacc

SEQ ID NO: 45357 - DNA, 22 bp, Artificial Sequence
  chemically synthesized
tctttcttgtgagctttcacct

SEQ ID NO: 45358 - DNA, 22 bp, Artificial Sequence
  chemically synthesized
tttcttgtgagctttcacctgc

SEQ ID NO: 45359 - DNA, 22 bp, Artificial Sequence
  chemically synthesized
tcttgtgagctttcacctgcta

SEQ ID NO: 45360 - DNA, 22 bp, Artificial Sequence
  chemically synthesized
cttgtgagctttcacctgctac

SEQ ID NO: 45361 - DNA, 22 bp, Artificial Sequence
  chemically synthesized
ttgtgagctttcacctgctact

SEQ ID NO: 45362 - DNA, 22 bp, Artificial Sequence
  chemically synthesized
gtgagctttcacctgctactct

SEQ ID NO: 45363 - DNA, 22 bp, Artificial Sequence
  chemically synthesized
tgagctttcacctgctactctt

SEQ ID NO: 45364 - DNA, 22 bp, Artificial Sequence
  chemically synthesized
tcacctgctactcttcaccagg

SEQ ID NO: 45365 - DNA, 22 bp, Artificial Sequence
  chemically synthesized
cacctgctactcttcaccaggc

SEQ ID NO: 45366 - DNA, 22 bp, Artificial Sequence
  chemically synthesized
acctgctactcttcaccaggca

SEQ ID NO: 45367 - DNA, 22 bp, Artificial Sequence
  chemically synthesized
ctactcttcaccaggcaaggct

SEQ ID NO: 45368 - DNA, 22 bp, Artificial Sequence
  chemically synthesized
ctcttcaccaggcaaggctcct

SEQ ID NO: 45369 - DNA, 22 bp, Artificial Sequence
  chemically synthesized
ttcaccaggcaaggctcctggc

SEQ ID NO: 45370 - DNA, 22 bp, Artificial Sequence
  chemically synthesized
caccaggcaaggctcctggctt

SEQ ID NO: 45371 - DNA, 22 bp, Artificial Sequence
  chemically synthesized
accaggcaaggctcctggcttg

SEQ ID NO: 45372 - DNA, 22 bp, Artificial Sequence
  chemically synthesized
ctggcttgggcccacagtgcag

SEQ ID NO: 45373 - DNA, 22 bp, Artificial Sequence
  chemically synthesized
gcttgggcccacagtgcaggca

SEQ ID NO: 45374 - DNA, 22 bp, Artificial Sequence
  chemically synthesized
gggcccacagtgcaggcacctc

SEQ ID NO: 45375 - DNA, 22 bp, Artificial Sequence
  chemically synthesized
ggcccacagtgcaggcacctcg

SEQ ID NO: 45376 - DNA, 22 bp, Artificial Sequence
  chemically synthesized
gaactcagttgaacatttccac

SEQ ID NO: 45377 - DNA, 22 bp, Artificial Sequence
  chemically synthesized
agttgaacatttccactggctg

SEQ ID NO: 45378 - DNA, 22 bp, Artificial Sequence
  chemically synthesized
aacatttccactggctgcactc

SEQ ID NO: 45379 - DNA, 22 bp, Artificial Sequence
  chemically synthesized
ccactggctgcactctgtgttt

SEQ ID NO: 45380 - DNA, 22 bp, Artificial Sequence
  chemically synthesized
cactggctgcactctgtgtttt

SEQ ID NO: 45381 - DNA, 22 bp, Artificial Sequence
  chemically synthesized
gctgcactctgtgtttttgtgg

SEQ ID NO: 45382 - DNA, 22 bp, Artificial Sequence
  chemically synthesized
cactctgtgtttttgtggggtg

SEQ ID NO: 45383 - DNA, 22 bp, Artificial Sequence
  chemically synthesized
tgtgtttttgtggggtgaagct

SEQ ID NO: 45384 - DNA, 22 bp, Artificial Sequence
  chemically synthesized
tgtttttgtggggtgaagctcc

SEQ ID NO: 45385 - DNA, 22 bp, Artificial Sequence
  chemically synthesized
ttgtggggtgaagctcccagag

SEQ ID NO: 45386 - DNA, 22 bp, Artificial Sequence
  chemically synthesized
tgtggggtgaagctcccagagg

SEQ ID NO: 45387 - DNA, 22 bp, Artificial Sequence
  chemically synthesized
gtggggtgaagctcccagaggt

SEQ ID NO: 45388 - DNA, 22 bp, Artificial Sequence
  chemically synthesized
tggggtgaagctcccagaggtg

SEQ ID NO: 45389 - DNA, 22 bp, Artificial Sequence
  chemically synthesized
ccagaggtgactgaaagtcctt

SEQ ID NO: 45390 - DNA, 22 bp, Artificial Sequence
  chemically synthesized
aaagtccttctgccactaacac

SEQ ID NO: 45391 - DNA, 22 bp, Artificial Sequence
  chemically synthesized
ctgccactaacactgcagtcat

SEQ ID NO: 45392 - DNA, 22 bp, Artificial Sequence
  chemically synthesized
tgccactaacactgcagtcata

SEQ ID NO: 45393 - DNA, 22 bp, Artificial Sequence
  chemically synthesized
ccactaacactgcagtcatact

SEQ ID NO: 45394 - DNA, 22 bp, Artificial Sequence
  chemically synthesized
acactgcagtcatactgccctt

SEQ ID NO: 45395 - DNA, 22 bp, Artificial Sequence
  chemically synthesized
cagtcatactgcccttgctgta

SEQ ID NO: 45396 - DNA, 22 bp, Artificial Sequence
  chemically synthesized
cccttgctgtacttggactagg

SEQ ID NO: 45397 - DNA, 22 bp, Artificial Sequence
  chemically synthesized
gctgtacttggactagggaagg

SEQ ID NO: 45398 - DNA, 22 bp, Artificial Sequence
  chemically synthesized
ctgtacttggactagggaagga

SEQ ID NO: 45399 - DNA, 22 bp, Artificial Sequence
  chemically synthesized
tacttggactagggaaggaaaa

SEQ ID NO: 45400 - DNA, 22 bp, Artificial Sequence
  chemically synthesized
ggactagggaaggaaaaaagat

SEQ ID NO: 45401 - DNA, 22 bp, Artificial Sequence
  chemically synthesized
gactagggaaggaaaaaagatc

SEQ ID NO: 45402 - DNA, 22 bp, Artificial Sequence
  chemically synthesized
gggaaggaaaaaagatcctgag

SEQ ID NO: 45403 - DNA, 22 bp, Artificial Sequence
  chemically synthesized
agtgctttactcacaccccagt

SEQ ID NO: 45404 - DNA, 22 bp, Artificial Sequence
  chemically synthesized
tactcacaccccagtgtgcccc

SEQ ID NO: 45405 - DNA, 22 bp, Artificial Sequence
  chemically synthesized
actcacaccccagtgtgcccca

SEQ ID NO: 45406 - DNA, 22 bp, Artificial Sequence
  chemically synthesized
ctcacaccccagtgtgccccag

SEQ ID NO: 45407 - DNA, 22 bp, Artificial Sequence
  chemically synthesized
acaccccagtgtgccccagcca

SEQ ID NO: 45408 - DNA, 22 bp, Artificial Sequence
  chemically synthesized
tggaaaagaggccagtgtgtca

SEQ ID NO: 45409 - DNA, 22 bp, Artificial Sequence
  chemically synthesized
caagcaccctgaggcccctgcc

SEQ ID NO: 45410 - DNA, 22 bp, Artificial Sequence
  chemically synthesized
aggcccctgcccctgctgcccc

SEQ ID NO: 45411 - DNA, 22 bp, Artificial Sequence
  chemically synthesized
cccctgctgcccccaagctgta

SEQ ID NO: 45412 - DNA, 22 bp, Artificial Sequence
  chemically synthesized
ctgcccccaagctgtagagcca

SEQ ID NO: 45413 - DNA, 22 bp, Artificial Sequence
  chemically synthesized
cccccaagctgtagagccagaa

SEQ ID NO: 45414 - DNA, 22 bp, Artificial Sequence
  chemically synthesized
tagagccagaatataaagctgg

SEQ ID NO: 45415 - DNA, 22 bp, Artificial Sequence
  chemically synthesized
gcagaaaaatgtaaaaaggcta

SEQ ID NO: 45416 - DNA, 22 bp, Artificial Sequence
  chemically synthesized
gactggcttagcctcccagcct

SEQ ID NO: 45417 - DNA, 22 bp, Artificial Sequence
  chemically synthesized
gcttagcctcccagcctacatc

SEQ ID NO: 45418 - DNA, 22 bp, Artificial Sequence
  chemically synthesized
agcctcccagcctacatctttc

SEQ ID NO: 45419 - DNA, 22 bp, Artificial Sequence
  chemically synthesized
gcctcccagcctacatctttct

SEQ ID NO: 45420 - DNA, 22 bp, Artificial Sequence
  chemically synthesized
ccagcctacatctttctcctgt

SEQ ID NO: 45421 - DNA, 22 bp, Artificial Sequence
  chemically synthesized
catctttctcctgtgctggatc

SEQ ID NO: 45422 - DNA, 22 bp, Artificial Sequence
  chemically synthesized
tctcctgtgctggatccttcct

SEQ ID NO: 45423 - DNA, 22 bp, Artificial Sequence
  chemically synthesized
ctcctgtgctggatccttcctg

SEQ ID NO: 45424 - DNA, 22 bp, Artificial Sequence
  chemically synthesized
tcctgtgctggatccttcctgc

SEQ ID NO: 45425 - DNA, 22 bp, Artificial Sequence
  chemically synthesized
ctgtgctggatccttcctgctc

SEQ ID NO: 45426 - DNA, 22 bp, Artificial Sequence
  chemically synthesized
tgctggatccttcctgctcttg

SEQ ID NO: 45427 - DNA, 22 bp, Artificial Sequence
  chemically synthesized
gatccttcctgctcttgaacat

SEQ ID NO: 45428 - DNA, 22 bp, Artificial Sequence
  chemically synthesized
cctgctcttgaacatcggactc

SEQ ID NO: 45429 - DNA, 22 bp, Artificial Sequence
  chemically synthesized
ctgctcttgaacatcggactcc

SEQ ID NO: 45430 - DNA, 22 bp, Artificial Sequence
  chemically synthesized
ctcttgaacatcggactccaag

SEQ ID NO: 45431 - DNA, 22 bp, Artificial Sequence
  chemically synthesized
ttgaacatcggactccaagttc

SEQ ID NO: 45432 - DNA, 22 bp, Artificial Sequence
  chemically synthesized
gaacatcggactccaagttctt

SEQ ID NO: 45433 - DNA, 22 bp, Artificial Sequence
  chemically synthesized
aacatcggactccaagttcttc

SEQ ID NO: 45434 - DNA, 22 bp, Artificial Sequence
  chemically synthesized
caagttcttcagctgtgggact

SEQ ID NO: 45435 - DNA, 22 bp, Artificial Sequence
  chemically synthesized
ttcagctgtgggacttggactg

SEQ ID NO: 45436 - DNA, 22 bp, Artificial Sequence
  chemically synthesized
cagctgtgggacttggactgtc

SEQ ID NO: 45437 - DNA, 22 bp, Artificial Sequence
  chemically synthesized
agctgtgggacttggactgtct

SEQ ID NO: 45438 - DNA, 22 bp, Artificial Sequence
  chemically synthesized
tgggacttggactgtcttcctt

SEQ ID NO: 45439 - DNA, 22 bp, Artificial Sequence
  chemically synthesized
ggactgtcttccttgctcctca

SEQ ID NO: 45440 - DNA, 22 bp, Artificial Sequence
  chemically synthesized
gactgtcttccttgctcctcag

SEQ ID NO: 45441 - DNA, 22 bp, Artificial Sequence
  chemically synthesized
tcttccttgctcctcagattgc

SEQ ID NO: 45442 - DNA, 22 bp, Artificial Sequence
  chemically synthesized
ccttgctcctcagattgcaggt

SEQ ID NO: 45443 - DNA, 22 bp, Artificial Sequence
  chemically synthesized
cttgctcctcagattgcaggtg

SEQ ID NO: 45444 - DNA, 22 bp, Artificial Sequence
  chemically synthesized
gctcctcagattgcaggtggcc

SEQ ID NO: 45445 - DNA, 22 bp, Artificial Sequence
  chemically synthesized
ctcctcagattgcaggtggcct

SEQ ID NO: 45446 - DNA, 22 bp, Artificial Sequence
  chemically synthesized
ctcagattgcaggtggcctatt

SEQ ID NO: 45447 - DNA, 22 bp, Artificial Sequence
  chemically synthesized
agattgcaggtggcctattatg

SEQ ID NO: 45448 - DNA, 22 bp, Artificial Sequence
  chemically synthesized
caggtggcctattatgggacct

SEQ ID NO: 45449 - DNA, 22 bp, Artificial Sequence
  chemically synthesized
ttatgggaccttgtaatcttgt

SEQ ID NO: 45450 - DNA, 22 bp, Artificial Sequence
  chemically synthesized
tgggaccttgtaatcttgtgag

SEQ ID NO: 45451 - DNA, 22 bp, Artificial Sequence
  chemically synthesized
gtaatcttgtgagttaatacca

SEQ ID NO: 45452 - DNA, 22 bp, Artificial Sequence
  chemically synthesized
taatcttgtgagttaataccac

SEQ ID NO: 45453 - DNA, 22 bp, Artificial Sequence
  chemically synthesized
gtgagttaataccacttaataa

SEQ ID NO: 45454 - DNA, 22 bp, Artificial Sequence
  chemically synthesized
tgagttaataccacttaataag

SEQ ID NO: 45455 - DNA, 22 bp, Artificial Sequence
  chemically synthesized
ataccacttaataagctcccct

SEQ ID NO: 45456 - DNA, 22 bp, Artificial Sequence
  chemically synthesized
aataagctcccctttgtgtgag

SEQ ID NO: 45457 - DNA, 22 bp, Artificial Sequence
  chemically synthesized
ataagctcccctttgtgtgagt

SEQ ID NO: 45458 - DNA, 22 bp, Artificial Sequence
  chemically synthesized
ccctttgtgtgagtatatctat

SEQ ID NO: 45459 - DNA, 22 bp, Artificial Sequence
  chemically synthesized
tgtgtgagtatatctatatcta

SEQ ID NO: 45460 - DNA, 22 bp, Artificial Sequence
  chemically synthesized
gtgtgagtatatctatatctat

SEQ ID NO: 45461 - DNA, 22 bp, Artificial Sequence
  chemically synthesized
tgtgagtatatctatatctata

SEQ ID NO: 45462 - DNA, 22 bp, Artificial Sequence
  chemically synthesized
tatctatagatagatataggta

SEQ ID NO: 45463 - DNA, 22 bp, Artificial Sequence
  chemically synthesized
tagatagatataggtatactca

SEQ ID NO: 45464 - DNA, 22 bp, Artificial Sequence
  chemically synthesized
actatatatacacatatataca

SEQ ID NO: 45465 - DNA, 22 bp, Artificial Sequence
  chemically synthesized
tatatacacatatatacatata

SEQ ID NO: 45466 - DNA, 22 bp, Artificial Sequence
  chemically synthesized
tctctctctctctctcatatat

SEQ ID NO: 45467 - DNA, 22 bp, Artificial Sequence
  chemically synthesized
tctctctctctctcatatatat

SEQ ID NO: 45468 - DNA, 22 bp, Artificial Sequence
  chemically synthesized
tctctctctctcatatatatat

SEQ ID NO: 45469 - DNA, 22 bp, Artificial Sequence
  chemically synthesized
tctctctctcatatatatatat

SEQ ID NO: 45470 - DNA, 22 bp, Artificial Sequence
  chemically synthesized
tctctctcatatatatatatat

SEQ ID NO: 45471 - DNA, 22 bp, Artificial Sequence
  chemically synthesized
tctctcatatatatatatatat

SEQ ID NO: 45472 - DNA, 22 bp, Artificial Sequence
  chemically synthesized
tctcatatatatatatatataa

SEQ ID NO: 45473 - DNA, 22 bp, Artificial Sequence
  chemically synthesized
tcatatatatatatatataatc

SEQ ID NO: 45474 - DNA, 22 bp, Artificial Sequence
  chemically synthesized
atatatatatatatataatctc

SEQ ID NO: 45475 - DNA, 22 bp, Artificial Sequence
  chemically synthesized
ctattagttctgtccctctaga

SEQ ID NO: 45476 - DNA, 22 bp, Artificial Sequence
  chemically synthesized
ttagttctgtccctctagagaa

SEQ ID NO: 45477 - DNA, 22 bp, Artificial Sequence
  chemically synthesized
gttctgtccctctagagaaccc

SEQ ID NO: 45478 - DNA, 22 bp, Artificial Sequence
  chemically synthesized
tgtccctctagagaaccccgac

SEQ ID NO: 45479 - DNA, 22 bp, Artificial Sequence
  chemically synthesized
tccctctagagaaccccgacta

SEQ ID NO: 45480 - DNA, 22 bp, Artificial Sequence
  chemically synthesized
tagagaaccccgactaatacag

SEQ ID NO: 45481 - DNA, 22 bp, Artificial Sequence
  chemically synthesized
gagaaccccgactaatacagat

SEQ ID NO: 45482 - DNA, 22 bp, Artificial Sequence
  chemically synthesized
atacagattttcataccagaag

SEQ ID NO: 45483 - DNA, 22 bp, Artificial Sequence
  chemically synthesized
tcataccagaagtggttcttga

SEQ ID NO: 45484 - DNA, 22 bp, Artificial Sequence
  chemically synthesized
cataccagaagtggttcttgag

SEQ ID NO: 45485 - DNA, 22 bp, Artificial Sequence
  chemically synthesized
ataccagaagtggttcttgagg

SEQ ID NO: 45486 - DNA, 22 bp, Artificial Sequence
  chemically synthesized
ttgaggaacagaatattaagga

SEQ ID NO: 45487 - DNA, 22 bp, Artificial Sequence
  chemically synthesized
gaggaacagaatattaaggatg

SEQ ID NO: 45488 - DNA, 22 bp, Artificial Sequence
  chemically synthesized
aggaacagaatattaaggatgg

SEQ ID NO: 45489 - DNA, 22 bp, Artificial Sequence
  chemically synthesized
aggatggaattctttcattggt

SEQ ID NO: 45490 - DNA, 22 bp, Artificial Sequence
  chemically synthesized
tttcattggttttgggacttct

SEQ ID NO: 45491 - DNA, 22 bp, Artificial Sequence
  chemically synthesized
tcattggttttgggacttctgg

SEQ ID NO: 45492 - DNA, 22 bp, Artificial Sequence
  chemically synthesized
cattggttttgggacttctggt

SEQ ID NO: 45493 - DNA, 22 bp, Artificial Sequence
  chemically synthesized
attggttttgggacttctggtg

SEQ ID NO: 45494 - DNA, 22 bp, Artificial Sequence
  chemically synthesized
gttttgggacttctggtgttgg

SEQ ID NO: 45495 - DNA, 22 bp, Artificial Sequence
  chemically synthesized
tgggacttctggtgttggctga

SEQ ID NO: 45496 - DNA, 22 bp, Artificial Sequence
  chemically synthesized
gggacttctggtgttggctgat

SEQ ID NO: 45497 - DNA, 22 bp, Artificial Sequence
  chemically synthesized
ggacttctggtgttggctgatt

SEQ ID NO: 45498 - DNA, 22 bp, Artificial Sequence
  chemically synthesized
ctggtgttggctgattaatatg

SEQ ID NO: 45499 - DNA, 22 bp, Artificial Sequence
  chemically synthesized
tggtgttggctgattaatatga

SEQ ID NO: 45500 - DNA, 22 bp, Artificial Sequence
  chemically synthesized
gtgttggctgattaatatgatt

SEQ ID NO: 45501 - DNA, 22 bp, Artificial Sequence
  chemically synthesized
gctgattaatatgattagacca

SEQ ID NO: 45502 - DNA, 22 bp, Artificial Sequence
  chemically synthesized
attaatatgattagaccaaaaa

SEQ ID NO: 45503 - DNA, 22 bp, Artificial Sequence
  chemically synthesized
atatgattagaccaaaaaatgc

SEQ ID NO: 45504 - DNA, 22 bp, Artificial Sequence
  chemically synthesized
gaccaaaaaatgctaaggactc

SEQ ID NO: 45505 - DNA, 22 bp, Artificial Sequence
  chemically synthesized
aggactctacttctaatagtat

SEQ ID NO: 45506 - DNA, 22 bp, Artificial Sequence
  chemically synthesized
tacttctaatagtatggagaac

SEQ ID NO: 45507 - DNA, 22 bp, Artificial Sequence
  chemically synthesized
cttctaatagtatggagaacac

SEQ ID NO: 45508 - DNA, 22 bp, Artificial Sequence
  chemically synthesized
ctaatagtatggagaacactga

SEQ ID NO: 45509 - DNA, 22 bp, Artificial Sequence
  chemically synthesized
taatagtatggagaacactgat

SEQ ID NO: 45510 - DNA, 22 bp, Artificial Sequence
  chemically synthesized
atagtatggagaacactgatag

SEQ ID NO: 45511 - DNA, 22 bp, Artificial Sequence
  chemically synthesized
atagtacttggcctgaattgtt

SEQ ID NO: 45512 - DNA, 22 bp, Artificial Sequence
  chemically synthesized
ggcctgaattgtttagagagtt

SEQ ID NO: 45513 - DNA, 22 bp, Artificial Sequence
  chemically synthesized
gcctgaattgtttagagagtta

SEQ ID NO: 45514 - DNA, 22 bp, Artificial Sequence
  chemically synthesized
aattgtttagagagttatgcaa

SEQ ID NO: 45515 - DNA, 22 bp, Artificial Sequence
  chemically synthesized
tttagagagttatgcaaaataa

SEQ ID NO: 45516 - DNA, 22 bp, Artificial Sequence
  chemically synthesized
agagagttatgcaaaataaatg

SEQ ID NO: 45517 - DNA, 22 bp, Artificial Sequence
  chemically synthesized
gagagttatgcaaaataaatgc

SEQ ID NO: 45518 - DNA, 22 bp, Artificial Sequence
  chemically synthesized
tgcaaaataaatgcatttgaca

SEQ ID NO: 45519 - DNA, 22 bp, Artificial Sequence
  chemically synthesized
gacactactgattcatcactta

SEQ ID NO: 45520 - DNA, 22 bp, Artificial Sequence
  chemically synthesized
acactactgattcatcacttat

SEQ ID NO: 45521 - DNA, 22 bp, Artificial Sequence
  chemically synthesized
ctgattcatcacttatgagagg

SEQ ID NO: 45522 - DNA, 22 bp, Artificial Sequence
  chemically synthesized
attcatcacttatgagaggcaa

SEQ ID NO: 45523 - DNA, 22 bp, Artificial Sequence
  chemically synthesized
atcacttatgagaggcaaggag

SEQ ID NO: 45524 - DNA, 22 bp, Artificial Sequence
  chemically synthesized
atgagaggcaaggagtttagtg

SEQ ID NO: 45525 - DNA, 22 bp, Artificial Sequence
  chemically synthesized
tgagaggcaaggagtttagtga

SEQ ID NO: 45526 - DNA, 22 bp, Artificial Sequence
  chemically synthesized
agtgactctatacataatacct

SEQ ID NO: 45527 - DNA, 22 bp, Artificial Sequence
  chemically synthesized
gtgactctatacataatacctt

SEQ ID NO: 45528 - DNA, 22 bp, Artificial Sequence
  chemically synthesized
tatacataatacctttgactat

SEQ ID NO: 45529 - DNA, 22 bp, Artificial Sequence
  chemically synthesized
tacataatacctttgactatat

SEQ ID NO: 45530 - DNA, 22 bp, Artificial Sequence
  chemically synthesized
tgactatatgtggagaaccaag

SEQ ID NO: 45531 - DNA, 22 bp, Artificial Sequence
  chemically synthesized
gactatatgtggagaaccaagg

SEQ ID NO: 45532 - DNA, 22 bp, Artificial Sequence
  chemically synthesized
actatatgtggagaaccaagga

SEQ ID NO: 45533 - DNA, 22 bp, Artificial Sequence
  chemically synthesized
tatgtggagaaccaaggaacat

SEQ ID NO: 45534 - DNA, 22 bp, Artificial Sequence
  chemically synthesized
gttgattgctcctaagttctct

SEQ ID NO: 45535 - DNA, 22 bp, Artificial Sequence
  chemically synthesized
attgctcctaagttctctggag

SEQ ID NO: 45536 - DNA, 22 bp, Artificial Sequence
  chemically synthesized
ctcctaagttctctggagaaag

SEQ ID NO: 45537 - DNA, 22 bp, Artificial Sequence
  chemically synthesized
ctaagttctctggagaaagaga

SEQ ID NO: 45538 - DNA, 22 bp, Artificial Sequence
  chemically synthesized
agttctctggagaaagagatga

SEQ ID NO: 45539 - DNA, 22 bp, Artificial Sequence
  chemically synthesized
tctggagaaagagatgaaagaa

SEQ ID NO: 45540 - DNA, 22 bp, Artificial Sequence
  chemically synthesized
tggagaaagagatgaaagaaaa

SEQ ID NO: 45541 - DNA, 22 bp, Artificial Sequence
  chemically synthesized
gagaaagagatgaaagaaaatg

SEQ ID NO: 45542 - DNA, 22 bp, Artificial Sequence
  chemically synthesized
aggggatctgtctcccaccttc

SEQ ID NO: 45543 - DNA, 22 bp, Artificial Sequence
  chemically synthesized
tctcccaccttcagaagcagat

SEQ ID NO: 45544 - DNA, 22 bp, Artificial Sequence
  chemically synthesized
ccaccttcagaagcagatactg

SEQ ID NO: 45545 - DNA, 22 bp, Artificial Sequence
  chemically synthesized
cagaagcagatactgagccaca

SEQ ID NO: 45546 - DNA, 22 bp, Artificial Sequence
  chemically synthesized
agaagcagatactgagccacaa

SEQ ID NO: 45547 - DNA, 22 bp, Artificial Sequence
  chemically synthesized
agccacaaatctgctaagattg

SEQ ID NO: 45548 - DNA, 22 bp, Artificial Sequence
  chemically synthesized
ctaagattgccctgaatgagag

SEQ ID NO: 45549 - DNA, 22 bp, Artificial Sequence
  chemically synthesized
agattgccctgaatgagagttt

SEQ ID NO: 45550 - DNA, 22 bp, Artificial Sequence
  chemically synthesized
ccctgaatgagagttttaactc

SEQ ID NO: 45551 - DNA, 22 bp, Artificial Sequence
  chemically synthesized
aatgagagttttaactcctgta

SEQ ID NO: 45552 - DNA, 22 bp, Artificial Sequence
  chemically synthesized
taactcctgtagagaaagagtt

SEQ ID NO: 45553 - DNA, 22 bp, Artificial Sequence
  chemically synthesized
aactcctgtagagaaagagttg

SEQ ID NO: 45554 - DNA, 22 bp, Artificial Sequence
  chemically synthesized
actcctgtagagaaagagttga

SEQ ID NO: 45555 - DNA, 22 bp, Artificial Sequence
  chemically synthesized
ctgtagagaaagagttgaaatt

SEQ ID NO: 45556 - DNA, 22 bp, Artificial Sequence
  chemically synthesized
tagagaaagagttgaaattgtg

SEQ ID NO: 45557 - DNA, 22 bp, Artificial Sequence
  chemically synthesized
aaattgtgaaaaaacagagaca

SEQ ID NO: 45558 - DNA, 22 bp, Artificial Sequence
  chemically synthesized
tgaaaaaacagagacaagctgt

SEQ ID NO: 45559 - DNA, 22 bp, Artificial Sequence
  chemically synthesized
ttatcatgcgagtagctgatct

SEQ ID NO: 45560 - DNA, 22 bp, Artificial Sequence
  chemically synthesized
tcatgcgagtagctgatctgca

SEQ ID NO: 45561 - DNA, 22 bp, Artificial Sequence
  chemically synthesized
atctgcaacaagaggtgcatgc

SEQ ID NO: 45562 - DNA, 22 bp, Artificial Sequence
  chemically synthesized
caacaagaggtgcatgcacagc

SEQ ID NO: 45563 - DNA, 22 bp, Artificial Sequence
  chemically synthesized
gccaggtgtttactgttaaagt

SEQ ID NO: 45564 - DNA, 22 bp, Artificial Sequence
  chemically synthesized
ccaggtgtttactgttaaagtg

SEQ ID NO: 45565 - DNA, 22 bp, Artificial Sequence
  chemically synthesized
actgttaaagtgagggcattga

SEQ ID NO: 45566 - DNA, 22 bp, Artificial Sequence
  chemically synthesized
ctgttaaagtgagggcattgac

SEQ ID NO: 45567 - DNA, 22 bp, Artificial Sequence
  chemically synthesized
ttaaagtgagggcattgactgg

SEQ ID NO: 45568 - DNA, 22 bp, Artificial Sequence
  chemically synthesized
aagtgagggcattgactggaaa

SEQ ID NO: 45569 - DNA, 22 bp, Artificial Sequence
  chemically synthesized
actggaaaaaaatgggaccctg

SEQ ID NO: 45570 - DNA, 22 bp, Artificial Sequence
  chemically synthesized
gaaaaaaatgggaccctggaac

SEQ ID NO: 45571 - DNA, 22 bp, Artificial Sequence
  chemically synthesized
gaacttggagtggggatgtgtg

SEQ ID NO: 45572 - DNA, 22 bp, Artificial Sequence
  chemically synthesized
ggagtggggatgtgtgggagaa

SEQ ID NO: 45573 - DNA, 22 bp, Artificial Sequence
  chemically synthesized
gagtggggatgtgtgggagaac

SEQ ID NO: 45574 - DNA, 22 bp, Artificial Sequence
  chemically synthesized
atgaagctgaggacactgagtt

SEQ ID NO: 45575 - DNA, 22 bp, Artificial Sequence
  chemically synthesized
aggacactgagtttgtgaactc

SEQ ID NO: 45576 - DNA, 22 bp, Artificial Sequence
  chemically synthesized
agtttgtgaactctgatgaaac

SEQ ID NO: 45577 - DNA, 22 bp, Artificial Sequence
  chemically synthesized
gtgaactctgatgaaacttttt

SEQ ID NO: 45578 - DNA, 22 bp, Artificial Sequence
  chemically synthesized
tgaactctgatgaaactttttt

SEQ ID NO: 45579 - DNA, 22 bp, Artificial Sequence
  chemically synthesized
tgatgaaacttttttgccagaa

SEQ ID NO: 45580 - DNA, 22 bp, Artificial Sequence
  chemically synthesized
atgaaacttttttgccagaaga

SEQ ID NO: 45581 - DNA, 22 bp, Artificial Sequence
  chemically synthesized
ttttgccagaagaaacagtttc

SEQ ID NO: 45582 - DNA, 22 bp, Artificial Sequence
  chemically synthesized
tttgccagaagaaacagtttcc

SEQ ID NO: 45583 - DNA, 22 bp, Artificial Sequence
  chemically synthesized
ttgccagaagaaacagtttccc

SEQ ID NO: 45584 - DNA, 22 bp, Artificial Sequence
  chemically synthesized
tgccagaagaaacagtttcccc

SEQ ID NO: 45585 - DNA, 22 bp, Artificial Sequence
  chemically synthesized
gccagaagaaacagtttcccca

SEQ ID NO: 45586 - DNA, 22 bp, Artificial Sequence
  chemically synthesized
ccagaagaaacagtttccccat

SEQ ID NO: 45587 - DNA, 22 bp, Artificial Sequence
  chemically synthesized
ccccatccccagtagtggtaac

SEQ ID NO: 45588 - DNA, 22 bp, Artificial Sequence
  chemically synthesized
cccatccccagtagtggtaaca

SEQ ID NO: 45589 - DNA, 22 bp, Artificial Sequence
  chemically synthesized
cctgacccgtgctgccattagc

SEQ ID NO: 45590 - DNA, 22 bp, Artificial Sequence
  chemically synthesized
acccgtgctgccattagccttt

SEQ ID NO: 45591 - DNA, 22 bp, Artificial Sequence
  chemically synthesized
ccattagcctttccacctttgt

SEQ ID NO: 45592 - DNA, 22 bp, Artificial Sequence
  chemically synthesized
gcctttccacctttgtctgagg

SEQ ID NO: 45593 - DNA, 22 bp, Artificial Sequence
  chemically synthesized
tccacctttgtctgaggatgta

SEQ ID NO: 45594 - DNA, 22 bp, Artificial Sequence
  chemically synthesized
ccacctttgtctgaggatgtaa

SEQ ID NO: 45595 - DNA, 22 bp, Artificial Sequence
  chemically synthesized
cacctttgtctgaggatgtaaa

SEQ ID NO: 45596 - DNA, 22 bp, Artificial Sequence
  chemically synthesized
tgtctgaggatgtaaaccctgc

SEQ ID NO: 45597 - DNA, 22 bp, Artificial Sequence
  chemically synthesized
gtctgaggatgtaaaccctgca

SEQ ID NO: 45598 - DNA, 22 bp, Artificial Sequence
  chemically synthesized
tctgaggatgtaaaccctgcac

SEQ ID NO: 45599 - DNA, 22 bp, Artificial Sequence
  chemically synthesized
aggatgtaaaccctgcactgct

SEQ ID NO: 45600 - DNA, 22 bp, Artificial Sequence
  chemically synthesized
cactgcttgaggcaacagtgat

SEQ ID NO: 45601 - DNA, 22 bp, Artificial Sequence
  chemically synthesized
cttgaggcaacagtgatggcct

SEQ ID NO: 45602 - DNA, 22 bp, Artificial Sequence
  chemically synthesized
gaggcaacagtgatggccttcc

SEQ ID NO: 45603 - DNA, 22 bp, Artificial Sequence
  chemically synthesized
aggcaacagtgatggccttccc

SEQ ID NO: 45604 - DNA, 22 bp, Artificial Sequence
  chemically synthesized
ccctgaggcagctgccaggcaa

SEQ ID NO: 45605 - DNA, 22 bp, Artificial Sequence
  chemically synthesized
cctgaggcagctgccaggcaag

SEQ ID NO: 45606 - DNA, 22 bp, Artificial Sequence
  chemically synthesized
aggcagctgccaggcaagataa

SEQ ID NO: 45607 - DNA, 22 bp, Artificial Sequence
  chemically synthesized
ccaggcaagataatgttgattc

SEQ ID NO: 45608 - DNA, 22 bp, Artificial Sequence
  chemically synthesized
attctcctcaagaggcacccct

SEQ ID NO: 45609 - DNA, 22 bp, Artificial Sequence
  chemically synthesized
tcctcaagaggcacccctaatg

SEQ ID NO: 45610 - DNA, 22 bp, Artificial Sequence
  chemically synthesized
ctcaagaggcacccctaatgcc

SEQ ID NO: 45611 - DNA, 22 bp, Artificial Sequence
  chemically synthesized
aagaggcacccctaatgcccct

SEQ ID NO: 45612 - DNA, 22 bp, Artificial Sequence
  chemically synthesized
atgcccctgaatgcttctagac

SEQ ID NO: 45613 - DNA, 22 bp, Artificial Sequence
  chemically synthesized
aatgcttctagacctataacta

SEQ ID NO: 45614 - DNA, 22 bp, Artificial Sequence
  chemically synthesized
ctagacctataactaggctaaa

SEQ ID NO: 45615 - DNA, 22 bp, Artificial Sequence
  chemically synthesized
tagacctataactaggctaaat

SEQ ID NO: 45616 - DNA, 22 bp, Artificial Sequence
  chemically synthesized
gacctataactaggctaaattc

SEQ ID NO: 45617 - DNA, 22 bp, Artificial Sequence
  chemically synthesized
taactaggctaaattccttgcg

SEQ ID NO: 45618 - DNA, 22 bp, Artificial Sequence
  chemically synthesized
ggctaaattccttgcgggcccc

SEQ ID NO: 45619 - DNA, 22 bp, Artificial Sequence
  chemically synthesized
aattccttgcgggccccagagg

SEQ ID NO: 45620 - DNA, 22 bp, Artificial Sequence
  chemically synthesized
cttgcgggccccagaggtgagg

SEQ ID NO: 45621 - DNA, 22 bp, Artificial Sequence
  chemically synthesized
gcgggccccagaggtgaggttc

SEQ ID NO: 45622 - DNA, 22 bp, Artificial Sequence
  chemically synthesized
cgggccccagaggtgaggttca

SEQ ID NO: 45623 - DNA, 22 bp, Artificial Sequence
  chemically synthesized
agagtgtgacccatgaggaggt

SEQ ID NO: 45624 - DNA, 22 bp, Artificial Sequence
  chemically synthesized
tactctaaaagaactgcttaag

SEQ ID NO: 45625 - DNA, 22 bp, Artificial Sequence
  chemically synthesized
taaaagaactgcttaagctttc

SEQ ID NO: 45626 - DNA, 22 bp, Artificial Sequence
  chemically synthesized
aaagaactgcttaagctttcta

SEQ ID NO: 45627 - DNA, 22 bp, Artificial Sequence
  chemically synthesized
cttaagctttctaatttatatt

SEQ ID NO: 45628 - DNA, 22 bp, Artificial Sequence
  chemically synthesized
aagctttctaatttatattggc

SEQ ID NO: 45629 - DNA, 22 bp, Artificial Sequence
  chemically synthesized
agctttctaatttatattggca

SEQ ID NO: 45630 - DNA, 22 bp, Artificial Sequence
  chemically synthesized
tctaatttatattggcagaaat

SEQ ID NO: 45631 - DNA, 22 bp, Artificial Sequence
  chemically synthesized
ctaatttatattggcagaaatc

SEQ ID NO: 45632 - DNA, 22 bp, Artificial Sequence
  chemically synthesized
taatttatattggcagaaatct

SEQ ID NO: 45633 - DNA, 22 bp, Artificial Sequence
  chemically synthesized
atttatattggcagaaatctgg

SEQ ID NO: 45634 - DNA, 22 bp, Artificial Sequence
  chemically synthesized
atattggcagaaatctggagaa

SEQ ID NO: 45635 - DNA, 22 bp, Artificial Sequence
  chemically synthesized
tattggcagaaatctggagaac

SEQ ID NO: 45636 - DNA, 22 bp, Artificial Sequence
  chemically synthesized
gcagaaatctggagaacaggca

SEQ ID NO: 45637 - DNA, 22 bp, Artificial Sequence
  chemically synthesized
gagaacaggcatgggaatggat

SEQ ID NO: 45638 - DNA, 22 bp, Artificial Sequence
  chemically synthesized
agggtaagggataatggtggaa

SEQ ID NO: 45639 - DNA, 22 bp, Artificial Sequence
  chemically synthesized
gatcaagctgaatttattggtt

SEQ ID NO: 45640 - DNA, 22 bp, Artificial Sequence
  chemically synthesized
aatttattggtttggccctact

SEQ ID NO: 45641 - DNA, 22 bp, Artificial Sequence
  chemically synthesized
attggtttggccctactaagta

SEQ ID NO: 45642 - DNA, 22 bp, Artificial Sequence
  chemically synthesized
ttggtttggccctactaagtag

SEQ ID NO: 45643 - DNA, 22 bp, Artificial Sequence
  chemically synthesized
gtttggccctactaagtaggga

SEQ ID NO: 45644 - DNA, 22 bp, Artificial Sequence
  chemically synthesized
ggccctactaagtagggattct

SEQ ID NO: 45645 - DNA, 22 bp, Artificial Sequence
  chemically synthesized
gccctactaagtagggattctg

SEQ ID NO: 45646 - DNA, 22 bp, Artificial Sequence
  chemically synthesized
ctaagtagggattctgcattta

SEQ ID NO: 45647 - DNA, 22 bp, Artificial Sequence
  chemically synthesized
agtagggattctgcatttaatg

SEQ ID NO: 45648 - DNA, 22 bp, Artificial Sequence
  chemically synthesized
tgcatttaatgttgcagctcgg

SEQ ID NO: 45649 - DNA, 22 bp, Artificial Sequence
  chemically synthesized
catttaatgttgcagctcgggg

SEQ ID NO: 45650 - DNA, 22 bp, Artificial Sequence
  chemically synthesized
aatgttgcagctcggggactta

SEQ ID NO: 45651 - DNA, 22 bp, Artificial Sequence
  chemically synthesized
atgttgcagctcggggacttag

SEQ ID NO: 45652 - DNA, 22 bp, Artificial Sequence
  chemically synthesized
cagctcggggacttagaaaagg

SEQ ID NO: 45653 - DNA, 22 bp, Artificial Sequence
  chemically synthesized
ggggacttagaaaaggttctga

SEQ ID NO: 45654 - DNA, 22 bp, Artificial Sequence
  chemically synthesized
agaaaaggttctgatagggccg

SEQ ID NO: 45655 - DNA, 22 bp, Artificial Sequence
  chemically synthesized
gaaaaggttctgatagggccgg

SEQ ID NO: 45656 - DNA, 22 bp, Artificial Sequence
  chemically synthesized
tgatagggccgggagcagtggc

SEQ ID NO: 45657 - DNA, 22 bp, Artificial Sequence
  chemically synthesized
atagggccgggagcagtggctc

SEQ ID NO: 45658 - DNA, 22 bp, Artificial Sequence
  chemically synthesized
acgcctgtaatcccagcacctt

SEQ ID NO: 45659 - DNA, 22 bp, Artificial Sequence
  chemically synthesized
taatcccagcaccttgggaggc

SEQ ID NO: 45660 - DNA, 22 bp, Artificial Sequence
  chemically synthesized
gggaggcgggggcgggcagatc

SEQ ID NO: 45661 - DNA, 22 bp, Artificial Sequence
  chemically synthesized
ggaggcgggggcgggcagatca

SEQ ID NO: 45662 - DNA, 22 bp, Artificial Sequence
  chemically synthesized
agacaattctggctaaaatggt

SEQ ID NO: 45663 - DNA, 22 bp, Artificial Sequence
  chemically synthesized
tggctaaaatggtgaaacccca

SEQ ID NO: 45664 - DNA, 22 bp, Artificial Sequence
  chemically synthesized
gctaaaatggtgaaaccccatc

SEQ ID NO: 45665 - DNA, 22 bp, Artificial Sequence
  chemically synthesized
aaatggtgaaaccccatctctg

SEQ ID NO: 45666 - DNA, 22 bp, Artificial Sequence
  chemically synthesized
tgctaaaaatacaaaaattagc

SEQ ID NO: 45667 - DNA, 22 bp, Artificial Sequence
  chemically synthesized
ctaaaaatacaaaaattagctg

SEQ ID NO: 45668 - DNA, 22 bp, Artificial Sequence
  chemically synthesized
aaaatacaaaaattagctgggc

SEQ ID NO: 45669 - DNA, 22 bp, Artificial Sequence
  chemically synthesized
gctgggcatggtgatgcgtaac

SEQ ID NO: 45670 - DNA, 22 bp, Artificial Sequence
  chemically synthesized
ggcatggtgatgcgtaactgta

SEQ ID NO: 45671 - DNA, 22 bp, Artificial Sequence
  chemically synthesized
taatctcatctacttgggaggc

SEQ ID NO: 45672 - DNA, 22 bp, Artificial Sequence
  chemically synthesized
atctacttgggaggctgaggca

SEQ ID NO: 45673 - DNA, 22 bp, Artificial Sequence
  chemically synthesized
cttgggaggctgaggcaagaga

SEQ ID NO: 45674 - DNA, 22 bp, Artificial Sequence
  chemically synthesized
gggaggctgaggcaagagaact

SEQ ID NO: 45675 - DNA, 22 bp, Artificial Sequence
  chemically synthesized
ggaggctgaggcaagagaactg

SEQ ID NO: 45676 - DNA, 22 bp, Artificial Sequence
  chemically synthesized
aggcaagagaactgcttgaacc

SEQ ID NO: 45677 - DNA, 22 bp, Artificial Sequence
  chemically synthesized
cttgaacctgtgaggcagagat

SEQ ID NO: 45678 - DNA, 22 bp, Artificial Sequence
  chemically synthesized
gaacctgtgaggcagagattgc

SEQ ID NO: 45679 - DNA, 22 bp, Artificial Sequence
  chemically synthesized
aacctgtgaggcagagattgca

SEQ ID NO: 45680 - DNA, 22 bp, Artificial Sequence
  chemically synthesized
tgaggcagagattgcagtgagc

SEQ ID NO: 45681 - DNA, 22 bp, Artificial Sequence
  chemically synthesized
cagtgagccaagatcgccccac

SEQ ID NO: 45682 - DNA, 22 bp, Artificial Sequence
  chemically synthesized
cattccagcctggtaacagagc

SEQ ID NO: 45683 - DNA, 22 bp, Artificial Sequence
  chemically synthesized
cagcctggtaacagagcaagac

SEQ ID NO: 45684 - DNA, 22 bp, Artificial Sequence
  chemically synthesized
gtaacagagcaagactccattt

SEQ ID NO: 45685 - DNA, 22 bp, Artificial Sequence
  chemically synthesized
catttccaaaaaaaaaaaaaaa

SEQ ID NO: 45686 - DNA, 22 bp, Artificial Sequence
  chemically synthesized
ccaaaaaaaaaaaaaaaaaagt

SEQ ID NO: 45687 - DNA, 22 bp, Artificial Sequence
  chemically synthesized
caaaaaaaaaaaaaaaaaagtt

SEQ ID NO: 45688 - DNA, 22 bp, Artificial Sequence
  chemically synthesized
taatagtttatttgcttggtta

SEQ ID NO: 45689 - DNA, 22 bp, Artificial Sequence
  chemically synthesized
atttgcttggttagctgaaata

SEQ ID NO: 45690 - DNA, 22 bp, Artificial Sequence
  chemically synthesized
tttgcttggttagctgaaatat

SEQ ID NO: 45691 - DNA, 22 bp, Artificial Sequence
  chemically synthesized
gcttggttagctgaaatatgga

SEQ ID NO: 45692 - DNA, 22 bp, Artificial Sequence
  chemically synthesized
cttggttagctgaaatatggat

SEQ ID NO: 45693 - DNA, 22 bp, Artificial Sequence
  chemically synthesized
ggttagctgaaatatggattaa

SEQ ID NO: 45694 - DNA, 22 bp, Artificial Sequence
  chemically synthesized
gttagctgaaatatggattaaa

SEQ ID NO: 45695 - DNA, 22 bp, Artificial Sequence
  chemically synthesized
gctgaaatatggattaaaagat

SEQ ID NO: 45696 - DNA, 22 bp, Artificial Sequence
  chemically synthesized
aaatatggattaaaagatggtc

SEQ ID NO: 45697 - DNA, 22 bp, Artificial Sequence
  chemically synthesized
aaagatggtccaatgttagtga

SEQ ID NO: 45698 - DNA, 22 bp, Artificial Sequence
  chemically synthesized
gtgagctggaaatgccttggtt

SEQ ID NO: 45699 - DNA, 22 bp, Artificial Sequence
  chemically synthesized
gaaatgccttggtttaatgtag

SEQ ID NO: 45700 - DNA, 22 bp, Artificial Sequence
  chemically synthesized
ggtttaatgtagaggaagtgat

SEQ ID NO: 45701 - DNA, 22 bp, Artificial Sequence
  chemically synthesized
gtttaatgtagaggaagtgatc

SEQ ID NO: 45702 - DNA, 22 bp, Artificial Sequence
  chemically synthesized
aatgtagaggaagtgatccaaa

SEQ ID NO: 45703 - DNA, 22 bp, Artificial Sequence
  chemically synthesized
atgtagaggaagtgatccaaag

SEQ ID NO: 45704 - DNA, 22 bp, Artificial Sequence
  chemically synthesized
agggagattaggatggtggagt

SEQ ID NO: 45705 - DNA, 22 bp, Artificial Sequence
  chemically synthesized
gggagattaggatggtggagtg

SEQ ID NO: 45706 - DNA, 22 bp, Artificial Sequence
  chemically synthesized
ggatggtggagtggattagtca

SEQ ID NO: 45707 - DNA, 22 bp, Artificial Sequence
  chemically synthesized
gtcactttagacctactcatcc

SEQ ID NO: 45708 - DNA, 22 bp, Artificial Sequence
  chemically synthesized
tagacctactcatcccagctgg

SEQ ID NO: 45709 - DNA, 22 bp, Artificial Sequence
  chemically synthesized
agacctactcatcccagctggg

SEQ ID NO: 45710 - DNA, 22 bp, Artificial Sequence
  chemically synthesized
gacctactcatcccagctggga

SEQ ID NO: 45711 - DNA, 22 bp, Artificial Sequence
  chemically synthesized
ctcatcccagctgggagggtcc

SEQ ID NO: 45712 - DNA, 22 bp, Artificial Sequence
  chemically synthesized
atcccagctgggagggtccaga

SEQ ID NO: 45713 - DNA, 22 bp, Artificial Sequence
  chemically synthesized
ggagggtccagaagatacaccc

SEQ ID NO: 45714 - DNA, 22 bp, Artificial Sequence
  chemically synthesized
ggccgaagctttgtgaaataga

SEQ ID NO: 45715 - DNA, 22 bp, Artificial Sequence
  chemically synthesized
gccgaagctttgtgaaatagat

SEQ ID NO: 45716 - DNA, 22 bp, Artificial Sequence
  chemically synthesized
tgtgaaatagatttgtgagagc

SEQ ID NO: 45717 - DNA, 22 bp, Artificial Sequence
  chemically synthesized
gtgaaatagatttgtgagagca

SEQ ID NO: 45718 - DNA, 22 bp, Artificial Sequence
  chemically synthesized
tgaaatagatttgtgagagcag

SEQ ID NO: 45719 - DNA, 22 bp, Artificial Sequence
  chemically synthesized
gtgagagcagcacctgtatttt

SEQ ID NO: 45720 - DNA, 22 bp, Artificial Sequence
  chemically synthesized
tgagagcagcacctgtattttt

SEQ ID NO: 45721 - DNA, 22 bp, Artificial Sequence
  chemically synthesized
tatttttgaagagcccgtaatt

SEQ ID NO: 45722 - DNA, 22 bp, Artificial Sequence
  chemically synthesized
ttgaagagcccgtaattgctct

SEQ ID NO: 45723 - DNA, 22 bp, Artificial Sequence
  chemically synthesized
tgaagagcccgtaattgctctt

SEQ ID NO: 45724 - DNA, 22 bp, Artificial Sequence
  chemically synthesized
gaagagcccgtaattgctcttc

SEQ ID NO: 45725 - DNA, 22 bp, Artificial Sequence
  chemically synthesized
aagagcccgtaattgctcttct

SEQ ID NO: 45726 - DNA, 22 bp, Artificial Sequence
  chemically synthesized
ctcttctctgtatgtcagatct

SEQ ID NO: 45727 - DNA, 22 bp, Artificial Sequence
  chemically synthesized
ttctctgtatgtcagatctaac

SEQ ID NO: 45728 - DNA, 22 bp, Artificial Sequence
  chemically synthesized
ctctgtatgtcagatctaacag

SEQ ID NO: 45729 - DNA, 22 bp, Artificial Sequence
  chemically synthesized
tctgtatgtcagatctaacagt

SEQ ID NO: 45730 - DNA, 22 bp, Artificial Sequence
  chemically synthesized
tgtatgtcagatctaacagtag

SEQ ID NO: 45731 - DNA, 22 bp, Artificial Sequence
  chemically synthesized
tatgtcagatctaacagtagga

SEQ ID NO: 45732 - DNA, 22 bp, Artificial Sequence
  chemically synthesized
acagtaggaaccacagtcactc

SEQ ID NO: 45733 - DNA, 22 bp, Artificial Sequence
  chemically synthesized
aactacaaaatttaaatacaat

SEQ ID NO: 45734 - DNA, 22 bp, Artificial Sequence
  chemically synthesized
caaaatttaaatacaatgggaa

SEQ ID NO: 45735 - DNA, 22 bp, Artificial Sequence
  chemically synthesized
aaatacaatgggaataattgga

SEQ ID NO: 45736 - DNA, 22 bp, Artificial Sequence
  chemically synthesized
aatacaatgggaataattggat

SEQ ID NO: 45737 - DNA, 22 bp, Artificial Sequence
  chemically synthesized
gatcctgaggtggcaggggcca

SEQ ID NO: 45738 - DNA, 22 bp, Artificial Sequence
  chemically synthesized
aggtggcaggggccaagtgttg

SEQ ID NO: 45739 - DNA, 22 bp, Artificial Sequence
  chemically synthesized
gcactgaaccatcaaaggcaag

SEQ ID NO: 45740 - DNA, 22 bp, Artificial Sequence
  chemically synthesized
aaccatcaaaggcaaggtgggc

SEQ ID NO: 45741 - DNA, 22 bp, Artificial Sequence
  chemically synthesized
ccataatagacagcagaggcaa

SEQ ID NO: 45742 - DNA, 22 bp, Artificial Sequence
  chemically synthesized
actcatgtagagctctggcatt

SEQ ID NO: 45743 - DNA, 22 bp, Artificial Sequence
  chemically synthesized
atgtagagctctggcattggct

SEQ ID NO: 45744 - DNA, 22 bp, Artificial Sequence
  chemically synthesized
tggcattggctaattaatcatg

SEQ ID NO: 45745 - DNA, 22 bp, Artificial Sequence
  chemically synthesized
gcattggctaattaatcatggt

SEQ ID NO: 45746 - DNA, 22 bp, Artificial Sequence
  chemically synthesized
gctaattaatcatggtgttcct

SEQ ID NO: 45747 - DNA, 22 bp, Artificial Sequence
  chemically synthesized
attaatcatggtgttcctagaa

SEQ ID NO: 45748 - DNA, 22 bp, Artificial Sequence
  chemically synthesized
atcatggtgttcctagaagtga

SEQ ID NO: 45749 - DNA, 22 bp, Artificial Sequence
  chemically synthesized
ctagaagtgaaattgatgggaa

SEQ ID NO: 45750 - DNA, 22 bp, Artificial Sequence
  chemically synthesized
gaagtgaaattgatgggaaacc

SEQ ID NO: 45751 - DNA, 22 bp, Artificial Sequence
  chemically synthesized
atgggaaacctactgtattcct

SEQ ID NO: 45752 - DNA, 22 bp, Artificial Sequence
  chemically synthesized
ctgtattcctacttgatttata

SEQ ID NO: 45753 - DNA, 22 bp, Artificial Sequence
  chemically synthesized
tattcctacttgatttatataa

SEQ ID NO: 45754 - DNA, 22 bp, Artificial Sequence
  chemically synthesized
ctacttgatttatataaacaaa

SEQ ID NO: 45755 - DNA, 22 bp, Artificial Sequence
  chemically synthesized
cttgatttatataaacaaaaaa

SEQ ID NO: 45756 - DNA, 22 bp, Artificial Sequence
  chemically synthesized
gatttatataaacaaaaaactg

SEQ ID NO: 45757 - DNA, 22 bp, Artificial Sequence
  chemically synthesized
atttatataaacaaaaaactgc

SEQ ID NO: 45758 - DNA, 22 bp, Artificial Sequence
  chemically synthesized
atataaacaaaaaactgccagg

SEQ ID NO: 45759 - DNA, 22 bp, Artificial Sequence
  chemically synthesized
tataaacaaaaaactgccaggt

SEQ ID NO: 45760 - DNA, 22 bp, Artificial Sequence
  chemically synthesized
ccaggtagaatggactaaagac

SEQ ID NO: 45761 - DNA, 22 bp, Artificial Sequence
  chemically synthesized
aagactaatctgaattataaaa

SEQ ID NO: 45762 - DNA, 22 bp, Artificial Sequence
  chemically synthesized
atctgaattataaaaacagaga

SEQ ID NO: 45763 - DNA, 22 bp, Artificial Sequence
  chemically synthesized
aattataaaaacagagaatcat

SEQ ID NO: 45764 - DNA, 22 bp, Artificial Sequence
  chemically synthesized
taaaaacagagaatcatgggcc

SEQ ID NO: 45765 - DNA, 22 bp, Artificial Sequence
  chemically synthesized
aatcaatttccagactcgaacc

SEQ ID NO: 45766 - DNA, 22 bp, Artificial Sequence
  chemically synthesized
ccagactcgaacctgttacagt

SEQ ID NO: 45767 - DNA, 22 bp, Artificial Sequence
  chemically synthesized
cagactcgaacctgttacagtt

SEQ ID NO: 45768 - DNA, 22 bp, Artificial Sequence
  chemically synthesized
gaacctgttacagttccagaac

SEQ ID NO: 45769 - DNA, 22 bp, Artificial Sequence
  chemically synthesized
ttacagttccagaacccactga

SEQ ID NO: 45770 - DNA, 22 bp, Artificial Sequence
  chemically synthesized
cagttccagaacccactgaatg

SEQ ID NO: 45771 - DNA, 22 bp, Artificial Sequence
  chemically synthesized
cagaacccactgaatgaagggg

SEQ ID NO: 45772 - DNA, 22 bp, Artificial Sequence
  chemically synthesized
aatgaaggggaggctggatccc

SEQ ID NO: 45773 - DNA, 22 bp, Artificial Sequence
  chemically synthesized
gatccccttgaggaaggacacc

SEQ ID NO: 45774 - DNA, 22 bp, Artificial Sequence
  chemically synthesized
gaggaaggacaccactaggcta

SEQ ID NO: 45775 - DNA, 22 bp, Artificial Sequence
  chemically synthesized
aggaaggacaccactaggctac

SEQ ID NO: 45776 - DNA, 22 bp, Artificial Sequence
  chemically synthesized
ggctactgacaacttatgctgt

SEQ ID NO: 45777 - DNA, 22 bp, Artificial Sequence
  chemically synthesized
ctgacaacttatgctgttactc

SEQ ID NO: 45778 - DNA, 22 bp, Artificial Sequence
  chemically synthesized
acaacttatgctgttactcttt

SEQ ID NO: 45779 - DNA, 22 bp, Artificial Sequence
  chemically synthesized
atgctgttactctttctcccat

SEQ ID NO: 45780 - DNA, 22 bp, Artificial Sequence
  chemically synthesized
tgctgttactctttctcccatc

SEQ ID NO: 45781 - DNA, 22 bp, Artificial Sequence
  chemically synthesized
ttactctttctcccatccttcc

SEQ ID NO: 45782 - DNA, 22 bp, Artificial Sequence
  chemically synthesized
ctctttctcccatccttcccta

SEQ ID NO: 45783 - DNA, 22 bp, Artificial Sequence
  chemically synthesized
tttctcccatccttccctaagg

SEQ ID NO: 45784 - DNA, 22 bp, Artificial Sequence
  chemically synthesized
tctcccatccttccctaaggag

SEQ ID NO: 45785 - DNA, 22 bp, Artificial Sequence
  chemically synthesized
ctcccatccttccctaaggaga

SEQ ID NO: 45786 - DNA, 22 bp, Artificial Sequence
  chemically synthesized
tcccatccttccctaaggagac

SEQ ID NO: 45787 - DNA, 22 bp, Artificial Sequence
  chemically synthesized
ccatccttccctaaggagacct

SEQ ID NO: 45788 - DNA, 22 bp, Artificial Sequence
  chemically synthesized
ccctaaggagacctctggcctt

SEQ ID NO: 45789 - DNA, 22 bp, Artificial Sequence
  chemically synthesized
cctaaggagacctctggccttt

SEQ ID NO: 45790 - DNA, 22 bp, Artificial Sequence
  chemically synthesized
aggagacctctggccttttacc

SEQ ID NO: 45791 - DNA, 22 bp, Artificial Sequence
  chemically synthesized
tggccttttaccagggtaactg

SEQ ID NO: 45792 - DNA, 22 bp, Artificial Sequence
  chemically synthesized
gccttttaccagggtaactgtg

SEQ ID NO: 45793 - DNA, 22 bp, Artificial Sequence
  chemically synthesized
ttaccagggtaactgtgtgtac

SEQ ID NO: 45794 - DNA, 22 bp, Artificial Sequence
  chemically synthesized
taccagggtaactgtgtgtact

SEQ ID NO: 45795 - DNA, 22 bp, Artificial Sequence
  chemically synthesized
accagggtaactgtgtgtactg

SEQ ID NO: 45796 - DNA, 22 bp, Artificial Sequence
  chemically synthesized
ccagggtaactgtgtgtactgg

SEQ ID NO: 45797 - DNA, 22 bp, Artificial Sequence
  chemically synthesized
tgtgtactggagaaagggaagt

SEQ ID NO: 45798 - DNA, 22 bp, Artificial Sequence
  chemically synthesized
gagaaagggaagtaatgagaca

SEQ ID NO: 45799 - DNA, 22 bp, Artificial Sequence
  chemically synthesized
cagaaagtactggacactggct

SEQ ID NO: 45800 - DNA, 22 bp, Artificial Sequence
  chemically synthesized
agaaagtactggacactggctc

SEQ ID NO: 45801 - DNA, 22 bp, Artificial Sequence
  chemically synthesized
gacactggctctgagctgacgt

SEQ ID NO: 45802 - DNA, 22 bp, Artificial Sequence
  chemically synthesized
gctctgagctgacgttgattcc

SEQ ID NO: 45803 - DNA, 22 bp, Artificial Sequence
  chemically synthesized
tgagctgacgttgattccaggg

SEQ ID NO: 45804 - DNA, 22 bp, Artificial Sequence
  chemically synthesized
agctgacgttgattccagggta

SEQ ID NO: 45805 - DNA, 22 bp, Artificial Sequence
  chemically synthesized
acgttgattccagggtacccaa

SEQ ID NO: 45806 - DNA, 22 bp, Artificial Sequence
  chemically synthesized
attccagggtacccaaaacgtt

SEQ ID NO: 45807 - DNA, 22 bp, Artificial Sequence
  chemically synthesized
cagggtacccaaaacgttattg

SEQ ID NO: 45808 - DNA, 22 bp, Artificial Sequence
  chemically synthesized
ttgtggttccccagttaaagta

SEQ ID NO: 45809 - DNA, 22 bp, Artificial Sequence
  chemically synthesized
tggttccccagttaaagtaggg

SEQ ID NO: 45810 - DNA, 22 bp, Artificial Sequence
  chemically synthesized
cccagttaaagtaggggcttat

SEQ ID NO: 45811 - DNA, 22 bp, Artificial Sequence
  chemically synthesized
aagtaggggcttatggaggtta

SEQ ID NO: 45812 - DNA, 22 bp, Artificial Sequence
  chemically synthesized
atggaggttaggtaattaatgg

SEQ ID NO: 45813 - DNA, 22 bp, Artificial Sequence
  chemically synthesized
tggaggttaggtaattaatgga

SEQ ID NO: 45814 - DNA, 22 bp, Artificial Sequence
  chemically synthesized
ggtaattaatggagttttagct

SEQ ID NO: 45815 - DNA, 22 bp, Artificial Sequence
  chemically synthesized
atggagttttagctcatttctg

SEQ ID NO: 45816 - DNA, 22 bp, Artificial Sequence
  chemically synthesized
tagctcatttctgacttacagt

SEQ ID NO: 45817 - DNA, 22 bp, Artificial Sequence
  chemically synthesized
agctcatttctgacttacagtg

SEQ ID NO: 45818 - DNA, 22 bp, Artificial Sequence
  chemically synthesized
gctcatttctgacttacagtgg

SEQ ID NO: 45819 - DNA, 22 bp, Artificial Sequence
  chemically synthesized
atttctgacttacagtggttcc

SEQ ID NO: 45820 - DNA, 22 bp, Artificial Sequence
  chemically synthesized
ctgacttacagtggttccagtg

SEQ ID NO: 45821 - DNA, 22 bp, Artificial Sequence
  chemically synthesized
tgacttacagtggttccagtgg

SEQ ID NO: 45822 - DNA, 22 bp, Artificial Sequence
  chemically synthesized
acttacagtggttccagtgggt

SEQ ID NO: 45823 - DNA, 22 bp, Artificial Sequence
  chemically synthesized
acagtggttccagtgggtccct

SEQ ID NO: 45824 - DNA, 22 bp, Artificial Sequence
  chemically synthesized
cagtggttccagtgggtccctg

SEQ ID NO: 45825 - DNA, 22 bp, Artificial Sequence
  chemically synthesized
cagtgggtccctggacttatcc

SEQ ID NO: 45826 - DNA, 22 bp, Artificial Sequence
  chemically synthesized
gacttatcctctggtcattttc

SEQ ID NO: 45827 - DNA, 22 bp, Artificial Sequence
  chemically synthesized
atcctctggtcattttcccagt

SEQ ID NO: 45828 - DNA, 22 bp, Artificial Sequence
  chemically synthesized
tcctctggtcattttcccagtg

SEQ ID NO: 45829 - DNA, 22 bp, Artificial Sequence
  chemically synthesized
tggtcattttcccagtgccaaa

SEQ ID NO: 45830 - DNA, 22 bp, Artificial Sequence
  chemically synthesized
gtcattttcccagtgccaaaat

SEQ ID NO: 45831 - DNA, 22 bp, Artificial Sequence
  chemically synthesized
tcccagtgccaaaatgcataat

SEQ ID NO: 45832 - DNA, 22 bp, Artificial Sequence
  chemically synthesized
cccagtgccaaaatgcataatt

SEQ ID NO: 45833 - DNA, 22 bp, Artificial Sequence
  chemically synthesized
ccagtgccaaaatgcataattt

SEQ ID NO: 45834 - DNA, 22 bp, Artificial Sequence
  chemically synthesized
gtatagacatacttattagctg

SEQ ID NO: 45835 - DNA, 22 bp, Artificial Sequence
  chemically synthesized
tatagacatacttattagctgg

SEQ ID NO: 45836 - DNA, 22 bp, Artificial Sequence
  chemically synthesized
attagctggcagaaatgccaca

SEQ ID NO: 45837 - DNA, 22 bp, Artificial Sequence
  chemically synthesized
ttagctggcagaaatgccacat

SEQ ID NO: 45838 - DNA, 22 bp, Artificial Sequence
  chemically synthesized
gctggcagaaatgccacattgg

SEQ ID NO: 45839 - DNA, 22 bp, Artificial Sequence
  chemically synthesized
gcagaaatgccacattggctcc

SEQ ID NO: 45840 - DNA, 22 bp, Artificial Sequence
  chemically synthesized
gctccctgactggtaggatgag

SEQ ID NO: 45841 - DNA, 22 bp, Artificial Sequence
  chemically synthesized
cctgactggtaggatgagggct

SEQ ID NO: 45842 - DNA, 22 bp, Artificial Sequence
  chemically synthesized
actggtaggatgagggctatta

SEQ ID NO: 45843 - DNA, 22 bp, Artificial Sequence
  chemically synthesized
gtaggatgagggctattatggt

SEQ ID NO: 45844 - DNA, 22 bp, Artificial Sequence
  chemically synthesized
ttatggtgggaaaggccaaaca

SEQ ID NO: 45845 - DNA, 22 bp, Artificial Sequence
  chemically synthesized
tggtgggaaaggccaaacagaa

SEQ ID NO: 45846 - DNA, 22 bp, Artificial Sequence
  chemically synthesized
gagctgtctctacctagaaaaa

SEQ ID NO: 45847 - DNA, 22 bp, Artificial Sequence
  chemically synthesized
tctctacctagaaaaataaaaa

SEQ ID NO: 45848 - DNA, 22 bp, Artificial Sequence
  chemically synthesized
tacctagaaaaataaaaaaatc

SEQ ID NO: 45849 - DNA, 22 bp, Artificial Sequence
  chemically synthesized
cctagaaaaataaaaaaatcaa

SEQ ID NO: 45850 - DNA, 22 bp, Artificial Sequence
  chemically synthesized
gaaaaataaaaaaatcaaaaac

SEQ ID NO: 45851 - DNA, 22 bp, Artificial Sequence
  chemically synthesized
gagggactgaagtgattagtgt

SEQ ID NO: 45852 - DNA, 22 bp, Artificial Sequence
  chemically synthesized
aagtgattagtgtcaccatcaa

SEQ ID NO: 45853 - DNA, 22 bp, Artificial Sequence
  chemically synthesized
gtgtcaccatcaaggacttgaa

SEQ ID NO: 45854 - DNA, 22 bp, Artificial Sequence
  chemically synthesized
gaaagacgcaggggtggtgatt

SEQ ID NO: 45855 - DNA, 22 bp, Artificial Sequence
  chemically synthesized
aaagacgcaggggtggtgattc

SEQ ID NO: 45856 - DNA, 22 bp, Artificial Sequence
  chemically synthesized
ccaccacatccctgttcaactc

SEQ ID NO: 45857 - DNA, 22 bp, Artificial Sequence
  chemically synthesized
ttcaactctcccatttgacctg

SEQ ID NO: 45858 - DNA, 22 bp, Artificial Sequence
  chemically synthesized
aactctcccatttgacctgtgc

SEQ ID NO: 45859 - DNA, 22 bp, Artificial Sequence
  chemically synthesized
tcccatttgacctgtgcagagg

SEQ ID NO: 45860 - DNA, 22 bp, Artificial Sequence
  chemically synthesized
ccatttgacctgtgcagaggac

SEQ ID NO: 45861 - DNA, 22 bp, Artificial Sequence
  chemically synthesized
gacctgtgcagaggacagatgg

SEQ ID NO: 45862 - DNA, 22 bp, Artificial Sequence
  chemically synthesized
acctgtgcagaggacagatgga

SEQ ID NO: 45863 - DNA, 22 bp, Artificial Sequence
  chemically synthesized
tgcagaggacagatggatcttg

SEQ ID NO: 45864 - DNA, 22 bp, Artificial Sequence
  chemically synthesized
ggaaaatgatggtggattattt

SEQ ID NO: 45865 - DNA, 22 bp, Artificial Sequence
  chemically synthesized
gaaaatgatggtggattatttt

SEQ ID NO: 45866 - DNA, 22 bp, Artificial Sequence
  chemically synthesized
ttttaagcttaaccaagtggtg

SEQ ID NO: 45867 - DNA, 22 bp, Artificial Sequence
  chemically synthesized
taagcttaaccaagtggtgact

SEQ ID NO: 45868 - DNA, 22 bp, Artificial Sequence
  chemically synthesized
aagcttaaccaagtggtgactc

SEQ ID NO: 45869 - DNA, 22 bp, Artificial Sequence
  chemically synthesized
agcttaaccaagtggtgactcc

SEQ ID NO: 45870 - DNA, 22 bp, Artificial Sequence
  chemically synthesized
aaccaagtggtgactccaattg

SEQ ID NO: 45871 - DNA, 22 bp, Artificial Sequence
  chemically synthesized
accaagtggtgactccaattgc

SEQ ID NO: 45872 - DNA, 22 bp, Artificial Sequence
  chemically synthesized
caattgcagctgctctaccagt

SEQ ID NO: 45873 - DNA, 22 bp, Artificial Sequence
  chemically synthesized
cagctgctctaccagttgtggt

SEQ ID NO: 45874 - DNA, 22 bp, Artificial Sequence
  chemically synthesized
ctctaccagttgtggttttgtt

SEQ ID NO: 45875 - DNA, 22 bp, Artificial Sequence
  chemically synthesized
taccagttgtggttttgttgct

SEQ ID NO: 45876 - DNA, 22 bp, Artificial Sequence
  chemically synthesized
ccagttgtggttttgttgcttg

SEQ ID NO: 45877 - DNA, 22 bp, Artificial Sequence
  chemically synthesized
tggttttgttgcttgagcaaat

SEQ ID NO: 45878 - DNA, 22 bp, Artificial Sequence
  chemically synthesized
tgttgcttgagcaaattaacac

SEQ ID NO: 45879 - DNA, 22 bp, Artificial Sequence
  chemically synthesized
gttgcttgagcaaattaacaca

SEQ ID NO: 45880 - DNA, 22 bp, Artificial Sequence
  chemically synthesized
ttgcttgagcaaattaacacat

SEQ ID NO: 45881 - DNA, 22 bp, Artificial Sequence
  chemically synthesized
cttgagcaaattaacacatctc

SEQ ID NO: 45882 - DNA, 22 bp, Artificial Sequence
  chemically synthesized
gagcaaattaacacatctcctg

SEQ ID NO: 45883 - DNA, 22 bp, Artificial Sequence
  chemically synthesized
agcaaattaacacatctcctgg

SEQ ID NO: 45884 - DNA, 22 bp, Artificial Sequence
  chemically synthesized
acacatctcctggtgcctggta

SEQ ID NO: 45885 - DNA, 22 bp, Artificial Sequence
  chemically synthesized
ctggtgcctggtatgcagccat

SEQ ID NO: 45886 - DNA, 22 bp, Artificial Sequence
  chemically synthesized
gtgcctggtatgcagccattgg

SEQ ID NO: 45887 - DNA, 22 bp, Artificial Sequence
  chemically synthesized
gtatgcagccattggcttggca

SEQ ID NO: 45888 - DNA, 22 bp, Artificial Sequence
  chemically synthesized
gcttggcaagtggctttttctc

SEQ ID NO: 45889 - DNA, 22 bp, Artificial Sequence
  chemically synthesized
ggcaagtggctttttctccatt

SEQ ID NO: 45890 - DNA, 22 bp, Artificial Sequence
  chemically synthesized
gcaagtggctttttctccattc

SEQ ID NO: 45891 - DNA, 22 bp, Artificial Sequence
  chemically synthesized
tttctccattcctgtccataag

SEQ ID NO: 45892 - DNA, 22 bp, Artificial Sequence
  chemically synthesized
ttctccattcctgtccataaga

SEQ ID NO: 45893 - DNA, 22 bp, Artificial Sequence
  chemically synthesized
tctccattcctgtccataagac

SEQ ID NO: 45894 - DNA, 22 bp, Artificial Sequence
  chemically synthesized
ctccattcctgtccataagacc

SEQ ID NO: 45895 - DNA, 22 bp, Artificial Sequence
  chemically synthesized
tccattcctgtccataagaccc

SEQ ID NO: 45896 - DNA, 22 bp, Artificial Sequence
  chemically synthesized
cattcctgtccataagacccac

SEQ ID NO: 45897 - DNA, 22 bp, Artificial Sequence
  chemically synthesized
ctgtccataagacccaccagaa

SEQ ID NO: 45898 - DNA, 22 bp, Artificial Sequence
  chemically synthesized
tccataagacccaccagaagca

SEQ ID NO: 45899 - DNA, 22 bp, Artificial Sequence
  chemically synthesized
gccttcagctgacaaggccagc

SEQ ID NO: 45900 - DNA, 22 bp, Artificial Sequence
  chemically synthesized
ccttcagctgacaaggccagca

SEQ ID NO: 45901 - DNA, 22 bp, Artificial Sequence
  chemically synthesized
cagctgacaaggccagcattat

SEQ ID NO: 45902 - DNA, 22 bp, Artificial Sequence
  chemically synthesized
agctgacaaggccagcattata

SEQ ID NO: 45903 - DNA, 22 bp, Artificial Sequence
  chemically synthesized
acaaggccagcattataccttt

SEQ ID NO: 45904 - DNA, 22 bp, Artificial Sequence
  chemically synthesized
tacctttaccaccctacctcag

SEQ ID NO: 45905 - DNA, 22 bp, Artificial Sequence
  chemically synthesized
taccaccctacctcaggggtgt

SEQ ID NO: 45906 - DNA, 22 bp, Artificial Sequence
  chemically synthesized
accaccctacctcaggggtgta

SEQ ID NO: 45907 - DNA, 22 bp, Artificial Sequence
  chemically synthesized
ccaccctacctcaggggtgtat

SEQ ID NO: 45908 - DNA, 22 bp, Artificial Sequence
  chemically synthesized
cctcaggggtgtatcaactctc

SEQ ID NO: 45909 - DNA, 22 bp, Artificial Sequence
  chemically synthesized
aggggtgtatcaactctccagc

SEQ ID NO: 45910 - DNA, 22 bp, Artificial Sequence
  chemically synthesized
tccagctttgtgtcataatctt

SEQ ID NO: 45911 - DNA, 22 bp, Artificial Sequence
  chemically synthesized
cagctttgtgtcataatcttat

SEQ ID NO: 45912 - DNA, 22 bp, Artificial Sequence
  chemically synthesized
tgtgtcataatcttatttggag

SEQ ID NO: 45913 - DNA, 22 bp, Artificial Sequence
  chemically synthesized
gtgtcataatcttatttggaga

SEQ ID NO: 45914 - DNA, 22 bp, Artificial Sequence
  chemically synthesized
tgtcataatcttatttggagag

SEQ ID NO: 45915 - DNA, 22 bp, Artificial Sequence
  chemically synthesized
atttggagagaccttgctcgct

SEQ ID NO: 45916 - DNA, 22 bp, Artificial Sequence
  chemically synthesized
tttggagagaccttgctcgctt

SEQ ID NO: 45917 - DNA, 22 bp, Artificial Sequence
  chemically synthesized
ggagagaccttgctcgcttttc

SEQ ID NO: 45918 - DNA, 22 bp, Artificial Sequence
  chemically synthesized
gagagaccttgctcgcttttca

SEQ ID NO: 45919 - DNA, 22 bp, Artificial Sequence
  chemically synthesized
gctcgcttttcacttccacgag

SEQ ID NO: 45920 - DNA, 22 bp, Artificial Sequence
  chemically synthesized
ctcgcttttcacttccacgaga

SEQ ID NO: 45921 - DNA, 22 bp, Artificial Sequence
  chemically synthesized
gcttttcacttccacgagatat

SEQ ID NO: 45922 - DNA, 22 bp, Artificial Sequence
  chemically synthesized
ttcacttccacgagatataaca

SEQ ID NO: 45923 - DNA, 22 bp, Artificial Sequence
  chemically synthesized
tcacttccacgagatataacac

SEQ ID NO: 45924 - DNA, 22 bp, Artificial Sequence
  chemically synthesized
cacttccacgagatataacact

SEQ ID NO: 45925 - DNA, 22 bp, Artificial Sequence
  chemically synthesized
acttccacgagatataacactg

SEQ ID NO: 45926 - DNA, 22 bp, Artificial Sequence
  chemically synthesized
ccacgagatataacactggtcc

SEQ ID NO: 45927 - DNA, 22 bp, Artificial Sequence
  chemically synthesized
cacgagatataacactggtcca

SEQ ID NO: 45928 - DNA, 22 bp, Artificial Sequence
  chemically synthesized
gtccattacattcatgacatta

SEQ ID NO: 45929 - DNA, 22 bp, Artificial Sequence
  chemically synthesized
cattcatgacattatgatgatt

SEQ ID NO: 45930 - DNA, 22 bp, Artificial Sequence
  chemically synthesized
atgacattatgatgattggata

SEQ ID NO: 45931 - DNA, 22 bp, Artificial Sequence
  chemically synthesized
tgatgattggatacagtgagca

SEQ ID NO: 45932 - DNA, 22 bp, Artificial Sequence
  chemically synthesized
gatacagtgagcaagaagtagc

SEQ ID NO: 45933 - DNA, 22 bp, Artificial Sequence
  chemically synthesized
aacttattggtgagacatttgt

SEQ ID NO: 45934 - DNA, 22 bp, Artificial Sequence
  chemically synthesized
attggtgagacatttgtatgcc

SEQ ID NO: 45935 - DNA, 22 bp, Artificial Sequence
  chemically synthesized
ttggtgagacatttgtatgcca

SEQ ID NO: 45936 - DNA, 22 bp, Artificial Sequence
  chemically synthesized
gtgagacatttgtatgccagag

SEQ ID NO: 45937 - DNA, 22 bp, Artificial Sequence
  chemically synthesized
gtatgccagaggatgggaaata

SEQ ID NO: 45938 - DNA, 22 bp, Artificial Sequence
  chemically synthesized
tatgccagaggatgggaaataa

SEQ ID NO: 45939 - DNA, 22 bp, Artificial Sequence
  chemically synthesized
aaatttagggactttctacctc

SEQ ID NO: 45940 - DNA, 22 bp, Artificial Sequence
  chemically synthesized
agggactttctacctcggtaaa

SEQ ID NO: 45941 - DNA, 22 bp, Artificial Sequence
  chemically synthesized
gggactttctacctcggtaaaa

SEQ ID NO: 45942 - DNA, 22 bp, Artificial Sequence
  chemically synthesized
tctacctcggtaaaatttctag

SEQ ID NO: 45943 - DNA, 22 bp, Artificial Sequence
  chemically synthesized
ctacctcggtaaaatttctagg

SEQ ID NO: 45944 - DNA, 22 bp, Artificial Sequence
  chemically synthesized
tacctcggtaaaatttctaggg

SEQ ID NO: 45945 - DNA, 22 bp, Artificial Sequence
  chemically synthesized
cctcggtaaaatttctagggtt

SEQ ID NO: 45946 - DNA, 22 bp, Artificial Sequence
  chemically synthesized
ggtaaaatttctagggttccag

SEQ ID NO: 45947 - DNA, 22 bp, Artificial Sequence
  chemically synthesized
ctagggttccagtggcatgaga

SEQ ID NO: 45948 - DNA, 22 bp, Artificial Sequence
  chemically synthesized
tagggttccagtggcatgagac

SEQ ID NO: 45949 - DNA, 22 bp, Artificial Sequence
  chemically synthesized
gggttccagtggcatgagacct

SEQ ID NO: 45950 - DNA, 22 bp, Artificial Sequence
  chemically synthesized
cagtggcatgagacctatggag

SEQ ID NO: 45951 - DNA, 22 bp, Artificial Sequence
  chemically synthesized
tggagatattccttctaaggtg

SEQ ID NO: 45952 - DNA, 22 bp, Artificial Sequence
  chemically synthesized
cttctaaggtgaagcataactt

SEQ ID NO: 45953 - DNA, 22 bp, Artificial Sequence
  chemically synthesized
ctaaggtgaagcataacttgct

SEQ ID NO: 45954 - DNA, 22 bp, Artificial Sequence
  chemically synthesized
taaggtgaagcataacttgctg

SEQ ID NO: 45955 - DNA, 22 bp, Artificial Sequence
  chemically synthesized
aggtgaagcataacttgctgcg

SEQ ID NO: 45956 - DNA, 22 bp, Artificial Sequence
  chemically synthesized
gctgcgtttggcccctcttaca

SEQ ID NO: 45957 - DNA, 22 bp, Artificial Sequence
  chemically synthesized
ctgcgtttggcccctcttacaa

SEQ ID NO: 45958 - DNA, 22 bp, Artificial Sequence
  chemically synthesized
cgtttggcccctcttacaacca

SEQ ID NO: 45959 - DNA, 22 bp, Artificial Sequence
  chemically synthesized
ggcccctcttacaaccaagaaa

SEQ ID NO: 45960 - DNA, 22 bp, Artificial Sequence
  chemically synthesized
gcccctcttacaaccaagaaag

SEQ ID NO: 45961 - DNA, 22 bp, Artificial Sequence
  chemically synthesized
ttacaaccaagaaagaggcaca

SEQ ID NO: 45962 - DNA, 22 bp, Artificial Sequence
  chemically synthesized
acaaccaagaaagaggcacaat

SEQ ID NO: 45963 - DNA, 22 bp, Artificial Sequence
  chemically synthesized
caaccaagaaagaggcacaatg

SEQ ID NO: 45964 - DNA, 22 bp, Artificial Sequence
  chemically synthesized
gtgggcctatttggattttgga

SEQ ID NO: 45965 - DNA, 22 bp, Artificial Sequence
  chemically synthesized
tttggattttggaggcaacaca

SEQ ID NO: 45966 - DNA, 22 bp, Artificial Sequence
  chemically synthesized
ggattttggaggcaacacattc

SEQ ID NO: 45967 - DNA, 22 bp, Artificial Sequence
  chemically synthesized
gattttggaggcaacacattcc

SEQ ID NO: 45968 - DNA, 22 bp, Artificial Sequence
  chemically synthesized
tggaggcaacacattcctcgtt

SEQ ID NO: 45969 - DNA, 22 bp, Artificial Sequence
  chemically synthesized
ggaggcaacacattcctcgttt

SEQ ID NO: 45970 - DNA, 22 bp, Artificial Sequence
  chemically synthesized
gaggcaacacattcctcgtttg

SEQ ID NO: 45971 - DNA, 22 bp, Artificial Sequence
  chemically synthesized
ctcgtttgggtgtgttactctg

SEQ ID NO: 45972 - DNA, 22 bp, Artificial Sequence
  chemically synthesized
gtttgggtgtgttactctggcc

SEQ ID NO: 45973 - DNA, 22 bp, Artificial Sequence
  chemically synthesized
gggtgtgttactctggcccatt

SEQ ID NO: 45974 - DNA, 22 bp, Artificial Sequence
  chemically synthesized
ggtgtgttactctggcccattt

SEQ ID NO: 45975 - DNA, 22 bp, Artificial Sequence
  chemically synthesized
ctctggcccatttatcgagtga

SEQ ID NO: 45976 - DNA, 22 bp, Artificial Sequence
  chemically synthesized
tggcccatttatcgagtgacct

SEQ ID NO: 45977 - DNA, 22 bp, Artificial Sequence
  chemically synthesized
gcccatttatcgagtgacctga

SEQ ID NO: 45978 - DNA, 22 bp, Artificial Sequence
  chemically synthesized
atcgagtgacctgaaaggctgc

SEQ ID NO: 45979 - DNA, 22 bp, Artificial Sequence
  chemically synthesized
tcgagtgacctgaaaggctgcc

SEQ ID NO: 45980 - DNA, 22 bp, Artificial Sequence
  chemically synthesized
aaaggctgccagatttaagtgc

SEQ ID NO: 45981 - DNA, 22 bp, Artificial Sequence
  chemically synthesized
ccagatttaagtgcagtctaga

SEQ ID NO: 45982 - DNA, 22 bp, Artificial Sequence
  chemically synthesized
aagtgcagtctagaacaaaaga

SEQ ID NO: 45983 - DNA, 22 bp, Artificial Sequence
  chemically synthesized
agtgcagtctagaacaaaagaa

SEQ ID NO: 45984 - DNA, 22 bp, Artificial Sequence
  chemically synthesized
gaacaaaagaaggctctgaaac

SEQ ID NO: 45985 - DNA, 22 bp, Artificial Sequence
  chemically synthesized
tgaaacaggtccaggctgctgt

SEQ ID NO: 45986 - DNA, 22 bp, Artificial Sequence
  chemically synthesized
aaacaggtccaggctgctgtga

SEQ ID NO: 45987 - DNA, 22 bp, Artificial Sequence
  chemically synthesized
ctgtgaaagctgctctgccatt

SEQ ID NO: 45988 - DNA, 22 bp, Artificial Sequence
  chemically synthesized
tgaaagctgctctgccatttgg

SEQ ID NO: 45989 - DNA, 22 bp, Artificial Sequence
  chemically synthesized
ctctgccatttgggccacatga

SEQ ID NO: 45990 - DNA, 22 bp, Artificial Sequence
  chemically synthesized
tgccatttgggccacatgaccc

SEQ ID NO: 45991 - DNA, 22 bp, Artificial Sequence
  chemically synthesized
ccatttgggccacatgaccccg

SEQ ID NO: 45992 - DNA, 22 bp, Artificial Sequence
  chemically synthesized
gggccacatgaccccgcagatc

SEQ ID NO: 45993 - DNA, 22 bp, Artificial Sequence
  chemically synthesized
ggccacatgaccccgcagatcc

SEQ ID NO: 45994 - DNA, 22 bp, Artificial Sequence
  chemically synthesized
gaggtgtcagtggcagataggg

SEQ ID NO: 45995 - DNA, 22 bp, Artificial Sequence
  chemically synthesized
aggtgtcagtggcagataggga

SEQ ID NO: 45996 - DNA, 22 bp, Artificial Sequence
  chemically synthesized
tttggagcctttggcaggcccc

SEQ ID NO: 45997 - DNA, 22 bp, Artificial Sequence
  chemically synthesized
ggagcctttggcaggcccccat

SEQ ID NO: 45998 - DNA, 22 bp, Artificial Sequence
  chemically synthesized
gagcctttggcaggcccccata

SEQ ID NO: 45999 - DNA, 22 bp, Artificial Sequence
  chemically synthesized
tggcaggcccccataggtgaat

SEQ ID NO: 46000 - DNA, 22 bp, Artificial Sequence
  chemically synthesized
ggcaggcccccataggtgaatc

SEQ ID NO: 46001 - DNA, 22 bp, Artificial Sequence
  chemically synthesized
gcaggcccccataggtgaatca

SEQ ID NO: 46002 - DNA, 22 bp, Artificial Sequence
  chemically synthesized
taggattttggagcaaggccct

SEQ ID NO: 46003 - DNA, 22 bp, Artificial Sequence
  chemically synthesized
ggattttggagcaaggccctgc

SEQ ID NO: 46004 - DNA, 22 bp, Artificial Sequence
  chemically synthesized
tggagcaaggccctgccacttc

SEQ ID NO: 46005 - DNA, 22 bp, Artificial Sequence
  chemically synthesized
ggagcaaggccctgccacttct

SEQ ID NO: 46006 - DNA, 22 bp, Artificial Sequence
  chemically synthesized
gagcaaggccctgccacttctg

SEQ ID NO: 46007 - DNA, 22 bp, Artificial Sequence
  chemically synthesized
ccacttctgcagataactactc

SEQ ID NO: 46008 - DNA, 22 bp, Artificial Sequence
  chemically synthesized
ctgcagataactactctccttt

SEQ ID NO: 46009 - DNA, 22 bp, Artificial Sequence
  chemically synthesized
tgcagataactactctcctttt

SEQ ID NO: 46010 - DNA, 22 bp, Artificial Sequence
  chemically synthesized
cagataactactctccttttga

SEQ ID NO: 46011 - DNA, 22 bp, Artificial Sequence
  chemically synthesized
ctctccttttgagagacagcta

SEQ ID NO: 46012 - DNA, 22 bp, Artificial Sequence
  chemically synthesized
tccttttgagagacagctattg

SEQ ID NO: 46013 - DNA, 22 bp, Artificial Sequence
  chemically synthesized
cttttgagagacagctattggt

SEQ ID NO: 46014 - DNA, 22 bp, Artificial Sequence
  chemically synthesized
ttgagagacagctattggtctg

SEQ ID NO: 46015 - DNA, 22 bp, Artificial Sequence
  chemically synthesized
tgagagacagctattggtctgt

SEQ ID NO: 46016 - DNA, 22 bp, Artificial Sequence
  chemically synthesized
gagagacagctattggtctgtt

SEQ ID NO: 46017 - DNA, 22 bp, Artificial Sequence
  chemically synthesized
agagacagctattggtctgtta

SEQ ID NO: 46018 - DNA, 22 bp, Artificial Sequence
  chemically synthesized
ttggtctgttattgggctttgg

SEQ ID NO: 46019 - DNA, 22 bp, Artificial Sequence
  chemically synthesized
gtctgttattgggctttggtgg

SEQ ID NO: 46020 - DNA, 22 bp, Artificial Sequence
  chemically synthesized
ttattgggctttggtggtaact

SEQ ID NO: 46021 - DNA, 22 bp, Artificial Sequence
  chemically synthesized
ttgggctttggtggtaactgaa

SEQ ID NO: 46022 - DNA, 22 bp, Artificial Sequence
  chemically synthesized
ggctttggtggtaactgaacgt

SEQ ID NO: 46023 - DNA, 22 bp, Artificial Sequence
  chemically synthesized
tggtggtaactgaacgtttgac

SEQ ID NO: 46024 - DNA, 22 bp, Artificial Sequence
  chemically synthesized
ggtggtaactgaacgtttgact

SEQ ID NO: 46025 - DNA, 22 bp, Artificial Sequence
  chemically synthesized
gtggtaactgaacgtttgactg

SEQ ID NO: 46026 - DNA, 22 bp, Artificial Sequence
  chemically synthesized
aacgtttgactgtgggtcataa

SEQ ID NO: 46027 - DNA, 22 bp, Artificial Sequence
  chemically synthesized
gactgtgggtcataaagtcacc

SEQ ID NO: 46028 - DNA, 22 bp, Artificial Sequence
  chemically synthesized
actgtgggtcataaagtcacca

SEQ ID NO: 46029 - DNA, 22 bp, Artificial Sequence
  chemically synthesized
tgggtcataaagtcaccatgct

SEQ ID NO: 46030 - DNA, 22 bp, Artificial Sequence
  chemically synthesized
cctgaacctgcctatcatgaac

SEQ ID NO: 46031 - DNA, 22 bp, Artificial Sequence
  chemically synthesized
aacctgcctatcatgaactggt

SEQ ID NO: 46032 - DNA, 22 bp, Artificial Sequence
  chemically synthesized
cctatcatgaactggttgcttt

SEQ ID NO: 46033 - DNA, 22 bp, Artificial Sequence
  chemically synthesized
tcatgaactggttgctttctga

SEQ ID NO: 46034 - DNA, 22 bp, Artificial Sequence
  chemically synthesized
gttgctttctgacccatctagc

SEQ ID NO: 46035 - DNA, 22 bp, Artificial Sequence
  chemically synthesized
ctttctgacccatctagccatg

SEQ ID NO: 46036 - DNA, 22 bp, Artificial Sequence
  chemically synthesized
tctgacccatctagccatgaag

SEQ ID NO: 46037 - DNA, 22 bp, Artificial Sequence
  chemically synthesized
ctgacccatctagccatgaagt

SEQ ID NO: 46038 - DNA, 22 bp, Artificial Sequence
  chemically synthesized
tgacccatctagccatgaagtg

SEQ ID NO: 46039 - DNA, 22 bp, Artificial Sequence
  chemically synthesized
acccatctagccatgaagtggg

SEQ ID NO: 46040 - DNA, 22 bp, Artificial Sequence
  chemically synthesized
gccatgaagtgggtcagcacag

SEQ ID NO: 46041 - DNA, 22 bp, Artificial Sequence
  chemically synthesized
catcatcaaattgaagtggtgt

SEQ ID NO: 46042 - DNA, 22 bp, Artificial Sequence
  chemically synthesized
atcatcaaattgaagtggtgtg

SEQ ID NO: 46043 - DNA, 22 bp, Artificial Sequence
  chemically synthesized
aagtggtgtgtatgtgatcggg

SEQ ID NO: 46044 - DNA, 22 bp, Artificial Sequence
  chemically synthesized
gagcaggtcctgaaggcacaag

SEQ ID NO: 46045 - DNA, 22 bp, Artificial Sequence
  chemically synthesized
agcaggtcctgaaggcacaagt

SEQ ID NO: 46046 - DNA, 22 bp, Artificial Sequence
  chemically synthesized
aaggcacaagtaagttacataa

SEQ ID NO: 46047 - DNA, 22 bp, Artificial Sequence
  chemically synthesized
cataaggaagtggctcaaatgc

SEQ ID NO: 46048 - DNA, 22 bp, Artificial Sequence
  chemically synthesized
aaatgcccatgttctccactca

SEQ ID NO: 46049 - DNA, 22 bp, Artificial Sequence
  chemically synthesized
tccactcatgccaccctgcctt

SEQ ID NO: 46050 - DNA, 22 bp, Artificial Sequence
  chemically synthesized
cactcatgccaccctgccttcc

SEQ ID NO: 46051 - DNA, 22 bp, Artificial Sequence
  chemically synthesized
atgccaccctgccttccctccc

SEQ ID NO: 46052 - DNA, 22 bp, Artificial Sequence
  chemically synthesized
ccttccctcccccagcctgcac

SEQ ID NO: 46053 - DNA, 22 bp, Artificial Sequence
  chemically synthesized
ccctcccccagcctgcaccaat

SEQ ID NO: 46054 - DNA, 22 bp, Artificial Sequence
  chemically synthesized
cctcccccagcctgcaccaatg

SEQ ID NO: 46055 - DNA, 22 bp, Artificial Sequence
  chemically synthesized
ccccagcctgcaccaatggcct

SEQ ID NO: 46056 - DNA, 22 bp, Artificial Sequence
  chemically synthesized
caccaatggcctcatggggagt

SEQ ID NO: 46057 - DNA, 22 bp, Artificial Sequence
  chemically synthesized
atggggagttccctatgatcag

SEQ ID NO: 46058 - DNA, 22 bp, Artificial Sequence
  chemically synthesized
cctatgatcagttgacagagga

SEQ ID NO: 46059 - DNA, 22 bp, Artificial Sequence
  chemically synthesized
tgatcagttgacagaggaaggg

SEQ ID NO: 46060 - DNA, 22 bp, Artificial Sequence
  chemically synthesized
acagaggaagggaagactaagg

SEQ ID NO: 46061 - DNA, 22 bp, Artificial Sequence
  chemically synthesized
aggactggttcatagatggttc

SEQ ID NO: 46062 - DNA, 22 bp, Artificial Sequence
  chemically synthesized
gttcatagatggttctgcacga

SEQ ID NO: 46063 - DNA, 22 bp, Artificial Sequence
  chemically synthesized
atagatggttctgcacgatatg

SEQ ID NO: 46064 - DNA, 22 bp, Artificial Sequence
  chemically synthesized
tgcacgatatgcaggcaccacc

SEQ ID NO: 46065 - DNA, 22 bp, Artificial Sequence
  chemically synthesized
cacgatatgcaggcaccacccg

SEQ ID NO: 46066 - DNA, 22 bp, Artificial Sequence
  chemically synthesized
cagcactatatccactttctaa

SEQ ID NO: 46067 - DNA, 22 bp, Artificial Sequence
  chemically synthesized
tatccactttctaaatgcatgt

SEQ ID NO: 46068 - DNA, 22 bp, Artificial Sequence
  chemically synthesized
tctaaatgcatgtgtacacttg

SEQ ID NO: 46069 - DNA, 22 bp, Artificial Sequence
  chemically synthesized
ctaaatgcatgtgtacacttgt

SEQ ID NO: 46070 - DNA, 22 bp, Artificial Sequence
  chemically synthesized
taaatgcatgtgtacacttgtg

SEQ ID NO: 46071 - DNA, 22 bp, Artificial Sequence
  chemically synthesized
aatgcatgtgtacacttgtgct

SEQ ID NO: 46072 - DNA, 22 bp, Artificial Sequence
  chemically synthesized
gtgctaagaaaatatctttatt

SEQ ID NO: 46073 - DNA, 22 bp, Artificial Sequence
  chemically synthesized
tgctaagaaaatatctttattt

SEQ ID NO: 46074 - DNA, 22 bp, Artificial Sequence
  chemically synthesized
agaaaatatctttattttattt

SEQ ID NO: 46075 - DNA, 22 bp, Artificial Sequence
  chemically synthesized
tattttatttcctttatttttc

SEQ ID NO: 46076 - DNA, 22 bp, Artificial Sequence
  chemically synthesized
attttatttcctttatttttcc

SEQ ID NO: 46077 - DNA, 22 bp, Artificial Sequence
  chemically synthesized
ttttatttcctttatttttcct

SEQ ID NO: 46078 - DNA, 22 bp, Artificial Sequence
  chemically synthesized
tatttcctttatttttccttta

SEQ ID NO: 46079 - DNA, 22 bp, Artificial Sequence
  chemically synthesized
atttcctttatttttcctttat

SEQ ID NO: 46080 - DNA, 22 bp, Artificial Sequence
  chemically synthesized
tttcctttatttttcctttatc

SEQ ID NO: 46081 - DNA, 22 bp, Artificial Sequence
  chemically synthesized
cctttatttttcctttatcatg

SEQ ID NO: 46082 - DNA, 22 bp, Artificial Sequence
  chemically synthesized
ctttatttttcctttatcatgt

SEQ ID NO: 46083 - DNA, 22 bp, Artificial Sequence
  chemically synthesized
tatttttcctttatcatgtgac

SEQ ID NO: 46084 - DNA, 22 bp, Artificial Sequence
  chemically synthesized
atttttcctttatcatgtgacc

SEQ ID NO: 46085 - DNA, 22 bp, Artificial Sequence
  chemically synthesized
tttttcctttatcatgtgacct

SEQ ID NO: 46086 - DNA, 22 bp, Artificial Sequence
  chemically synthesized
ttcctttatcatgtgaccttag

SEQ ID NO: 46087 - DNA, 22 bp, Artificial Sequence
  chemically synthesized
tcctttatcatgtgaccttaga

SEQ ID NO: 46088 - DNA, 22 bp, Artificial Sequence
  chemically synthesized
cctttatcatgtgaccttagat

SEQ ID NO: 46089 - DNA, 22 bp, Artificial Sequence
  chemically synthesized
ctttatcatgtgaccttagatt

SEQ ID NO: 46090 - DNA, 22 bp, Artificial Sequence
  chemically synthesized
tatcatgtgaccttagatttat

SEQ ID NO: 46091 - DNA, 22 bp, Artificial Sequence
  chemically synthesized
atcatgtgaccttagatttatg

SEQ ID NO: 46092 - DNA, 22 bp, Artificial Sequence
  chemically synthesized
tcatgtgaccttagatttatgg

SEQ ID NO: 46093 - DNA, 22 bp, Artificial Sequence
  chemically synthesized
agatttatggacttcacatcag

SEQ ID NO: 46094 - DNA, 22 bp, Artificial Sequence
  chemically synthesized
gatttatggacttcacatcagc

SEQ ID NO: 46095 - DNA, 22 bp, Artificial Sequence
  chemically synthesized
atggacttcacatcagcattta

SEQ ID NO: 46096 - DNA, 22 bp, Artificial Sequence
  chemically synthesized
tggacttcacatcagcatttaa

SEQ ID NO: 46097 - DNA, 22 bp, Artificial Sequence
  chemically synthesized
cacatcagcatttaagcattta

SEQ ID NO: 46098 - DNA, 22 bp, Artificial Sequence
  chemically synthesized
acatcagcatttaagcatttaa

SEQ ID NO: 46099 - DNA, 22 bp, Artificial Sequence
  chemically synthesized
aagcatttaagtgttgttcata

SEQ ID NO: 46100 - DNA, 22 bp, Artificial Sequence
  chemically synthesized
agcatttaagtgttgttcatat

SEQ ID NO: 46101 - DNA, 22 bp, Artificial Sequence
  chemically synthesized
aagtgttgttcatatcagcatt

SEQ ID NO: 46102 - DNA, 22 bp, Artificial Sequence
  chemically synthesized
agtgttgttcatatcagcattt

SEQ ID NO: 46103 - DNA, 22 bp, Artificial Sequence
  chemically synthesized
ttcatatcagcatttaaatatt

SEQ ID NO: 46104 - DNA, 22 bp, Artificial Sequence
  chemically synthesized
atatcagcatttaaatattgtt

SEQ ID NO: 46105 - DNA, 22 bp, Artificial Sequence
  chemically synthesized
aaatattgttaaccttatgtaa

SEQ ID NO: 46106 - DNA, 22 bp, Artificial Sequence
  chemically synthesized
aatattgttaaccttatgtaat

SEQ ID NO: 46107 - DNA, 22 bp, Artificial Sequence
  chemically synthesized
ttaaccttatgtaataactttt

SEQ ID NO: 46108 - DNA, 22 bp, Artificial Sequence
  chemically synthesized
accttatgtaataacttttggt

SEQ ID NO: 46109 - DNA, 22 bp, Artificial Sequence
  chemically synthesized
atgtaataacttttggtttggg

SEQ ID NO: 46110 - DNA, 22 bp, Artificial Sequence
  chemically synthesized
tgtaataacttttggtttgggg

SEQ ID NO: 46111 - DNA, 22 bp, Artificial Sequence
  chemically synthesized
ttggtttggggattggtgcgtt

SEQ ID NO: 46112 - DNA, 22 bp, Artificial Sequence
  chemically synthesized
tggtttggggattggtgcgttt

SEQ ID NO: 46113 - DNA, 22 bp, Artificial Sequence
  chemically synthesized
ggtttggggattggtgcgtttc

SEQ ID NO: 46114 - DNA, 22 bp, Artificial Sequence
  chemically synthesized
gtttggggattggtgcgtttct

SEQ ID NO: 46115 - DNA, 22 bp, Artificial Sequence
  chemically synthesized
ggggattggtgcgtttctggtt

SEQ ID NO: 46116 - DNA, 22 bp, Artificial Sequence
  chemically synthesized
gggattggtgcgtttctggttg

SEQ ID NO: 46117 - DNA, 22 bp, Artificial Sequence
  chemically synthesized
gtgcgtttctggttgtatgagg

SEQ ID NO: 46118 - DNA, 22 bp, Artificial Sequence
  chemically synthesized
ctggttgtatgaggatagttgt

SEQ ID NO: 46119 - DNA, 22 bp, Artificial Sequence
  chemically synthesized
tggttgtatgaggatagttgta

SEQ ID NO: 46120 - DNA, 22 bp, Artificial Sequence
  chemically synthesized
gttgtatgaggatagttgtatt

SEQ ID NO: 46121 - DNA, 22 bp, Artificial Sequence
  chemically synthesized
tatgaggatagttgtattatat

SEQ ID NO: 46122 - DNA, 22 bp, Artificial Sequence
  chemically synthesized
tattatattaggcataattatg

SEQ ID NO: 46123 - DNA, 22 bp, Artificial Sequence
  chemically synthesized
tattaggcataattatgacctt

SEQ ID NO: 46124 - DNA, 22 bp, Artificial Sequence
  chemically synthesized
ggcataattatgaccttattat

SEQ ID NO: 46125 - DNA, 22 bp, Artificial Sequence
  chemically synthesized
tgaccttattattgtctttatt

SEQ ID NO: 46126 - DNA, 22 bp, Artificial Sequence
  chemically synthesized
attattgtctttatttgaagat

SEQ ID NO: 46127 - DNA, 22 bp, Artificial Sequence
  chemically synthesized
ttattgtctttatttgaagatt

SEQ ID NO: 46128 - DNA, 22 bp, Artificial Sequence
  chemically synthesized
ttgtctttatttgaagattatg

SEQ ID NO: 46129 - DNA, 22 bp, Artificial Sequence
  chemically synthesized
tctttatttgaagattatgtat

SEQ ID NO: 46130 - DNA, 22 bp, Artificial Sequence
  chemically synthesized
tatttgaagattatgtatgatt

SEQ ID NO: 46131 - DNA, 22 bp, Artificial Sequence
  chemically synthesized
atttgaagattatgtatgattt

SEQ ID NO: 46132 - DNA, 22 bp, Artificial Sequence
  chemically synthesized
tttgaagattatgtatgatttc

SEQ ID NO: 46133 - DNA, 22 bp, Artificial Sequence
  chemically synthesized
gaagattatgtatgatttcagg

SEQ ID NO: 46134 - DNA, 22 bp, Artificial Sequence
  chemically synthesized
aagattatgtatgatttcagga

SEQ ID NO: 46135 - DNA, 22 bp, Artificial Sequence
  chemically synthesized
tgtatgatttcaggatgtgtgt

SEQ ID NO: 46136 - DNA, 22 bp, Artificial Sequence
  chemically synthesized
caggatgtgtgtatgggttcaa

SEQ ID NO: 46137 - DNA, 22 bp, Artificial Sequence
  chemically synthesized
aggatgtgtgtatgggttcaag

SEQ ID NO: 46138 - DNA, 22 bp, Artificial Sequence
  chemically synthesized
aagttgacaaggagttggactt

SEQ ID NO: 46139 - DNA, 22 bp, Artificial Sequence
  chemically synthesized
acaaggagttggacttgtgatg

SEQ ID NO: 46140 - DNA, 22 bp, Artificial Sequence
  chemically synthesized
gacttgtgatggttaatactgt

SEQ ID NO: 46141 - DNA, 22 bp, Artificial Sequence
  chemically synthesized
gtgatggttaatactgtcaact

SEQ ID NO: 46142 - DNA, 22 bp, Artificial Sequence
  chemically synthesized
tgatggttaatactgtcaactt

SEQ ID NO: 46143 - DNA, 22 bp, Artificial Sequence
  chemically synthesized
atactgtcaacttgattggatt

SEQ ID NO: 46144 - DNA, 22 bp, Artificial Sequence
  chemically synthesized
tcaacttgattggattgaaaga

SEQ ID NO: 46145 - DNA, 22 bp, Artificial Sequence
  chemically synthesized
gattggattgaaagatgcaaag

SEQ ID NO: 46146 - DNA, 22 bp, Artificial Sequence
  chemically synthesized
attggattgaaagatgcaaagt

SEQ ID NO: 46147 - DNA, 22 bp, Artificial Sequence
  chemically synthesized
gattgaaagatgcaaagtatta

SEQ ID NO: 46148 - DNA, 22 bp, Artificial Sequence
  chemically synthesized
aaagatgcaaagtattaatctc

SEQ ID NO: 46149 - DNA, 22 bp, Artificial Sequence
  chemically synthesized
atctcggttatgtctgtgaggg

SEQ ID NO: 46150 - DNA, 22 bp, Artificial Sequence
  chemically synthesized
ggttatgtctgtgagggtgtgg

SEQ ID NO: 46151 - DNA, 22 bp, Artificial Sequence
  chemically synthesized
tgtctgtgagggtgtggcaaaa

SEQ ID NO: 46152 - DNA, 22 bp, Artificial Sequence
  chemically synthesized
tgagggtgtggcaaaaggagat

SEQ ID NO: 46153 - DNA, 22 bp, Artificial Sequence
  chemically synthesized
acatttgagtcagtgggctggg

SEQ ID NO: 46154 - DNA, 20 bp, Artificial Sequence
  chemically synthesized
taacgaccccggtaggtgag

SEQ ID NO: 46155 - DNA, 20 bp, Artificial Sequence
  chemically synthesized
accccggtaggtgagaggcc

SEQ ID NO: 46156 - DNA, 20 bp, Artificial Sequence
  chemically synthesized
ccccggtaggtgagaggcca

SEQ ID NO: 46157 - DNA, 20 bp, Artificial Sequence
  chemically synthesized
ggtgagaggccaaggtccca

SEQ ID NO: 46158 - DNA, 20 bp, Artificial Sequence
  chemically synthesized
gtgagaggccaaggtcccaa

SEQ ID NO: 46159 - DNA, 20 bp, Artificial Sequence
  chemically synthesized
tgagaggccaaggtcccaaa

SEQ ID NO: 46160 - DNA, 20 bp, Artificial Sequence
  chemically synthesized
gagaggccaaggtcccaaag

SEQ ID NO: 46161 - DNA, 20 bp, Artificial Sequence
  chemically synthesized
gaggccaaggtcccaaaggg

SEQ ID NO: 46162 - DNA, 20 bp, Artificial Sequence
  chemically synthesized
gccaaggtcccaaaggggag

SEQ ID NO: 46163 - DNA, 20 bp, Artificial Sequence
  chemically synthesized
aaggtcccaaaggggagcag

SEQ ID NO: 46164 - DNA, 20 bp, Artificial Sequence
  chemically synthesized
aggtcccaaaggggagcagc

SEQ ID NO: 46165 - DNA, 20 bp, Artificial Sequence
  chemically synthesized
ggtcccaaaggggagcagca

SEQ ID NO: 46166 - DNA, 20 bp, Artificial Sequence
  chemically synthesized
ccaaaggggagcagcaggga

SEQ ID NO: 46167 - DNA, 20 bp, Artificial Sequence
  chemically synthesized
aggggagcagcagggaaagt

SEQ ID NO: 46168 - DNA, 20 bp, Artificial Sequence
  chemically synthesized
gctcccatctattcttgctc

SEQ ID NO: 46169 - DNA, 20 bp, Artificial Sequence
  chemically synthesized
ctcccatctattcttgctcc

SEQ ID NO: 46170 - DNA, 20 bp, Artificial Sequence
  chemically synthesized
tcccatctattcttgctcca

SEQ ID NO: 46171 - DNA, 20 bp, Artificial Sequence
  chemically synthesized
cccatctattcttgctccag

SEQ ID NO: 46172 - DNA, 20 bp, Artificial Sequence
  chemically synthesized
catctattcttgctccaggg

SEQ ID NO: 46173 - DNA, 20 bp, Artificial Sequence
  chemically synthesized
atctattcttgctccagggg

SEQ ID NO: 46174 - DNA, 20 bp, Artificial Sequence
  chemically synthesized
ctccaggggaggcctttgat

SEQ ID NO: 46175 - DNA, 20 bp, Artificial Sequence
  chemically synthesized
tccaggggaggcctttgatg

SEQ ID NO: 46176 - DNA, 20 bp, Artificial Sequence
  chemically synthesized
aggggaggcctttgatgagg

SEQ ID NO: 46177 - DNA, 20 bp, Artificial Sequence
  chemically synthesized
tttgatgaggaagctgccaa

SEQ ID NO: 46178 - DNA, 20 bp, Artificial Sequence
  chemically synthesized
tgcaaatacaattccaatta

SEQ ID NO: 46179 - DNA, 20 bp, Artificial Sequence
  chemically synthesized
gcaaatacaattccaattac

SEQ ID NO: 46180 - DNA, 20 bp, Artificial Sequence
  chemically synthesized
acaattccaattacaggcaa

SEQ ID NO: 46181 - DNA, 20 bp, Artificial Sequence
  chemically synthesized
caattccaattacaggcaac

SEQ ID NO: 46182 - DNA, 20 bp, Artificial Sequence
  chemically synthesized
ttccaattacaggcaacagg

SEQ ID NO: 46183 - DNA, 20 bp, Artificial Sequence
  chemically synthesized
tccaattacaggcaacagga

SEQ ID NO: 46184 - DNA, 20 bp, Artificial Sequence
  chemically synthesized
caattacaggcaacaggaag

SEQ ID NO: 46185 - DNA, 20 bp, Artificial Sequence
  chemically synthesized
accacctctgccacctctgt

SEQ ID NO: 46186 - DNA, 20 bp, Artificial Sequence
  chemically synthesized
cacctctgtcagcaaaccat

SEQ ID NO: 46187 - DNA, 20 bp, Artificial Sequence
  chemically synthesized
gctcctactctgtgctgcga

SEQ ID NO: 46188 - DNA, 20 bp, Artificial Sequence
  chemically synthesized
cctactctgtgctgcgatgg

SEQ ID NO: 46189 - DNA, 20 bp, Artificial Sequence
  chemically synthesized
ctactctgtgctgcgatggc

SEQ ID NO: 46190 - DNA, 20 bp, Artificial Sequence
  chemically synthesized
tgctgcgatggcgggctcga

SEQ ID NO: 46191 - DNA, 20 bp, Artificial Sequence
  chemically synthesized
gctgcgatggcgggctcgat

SEQ ID NO: 46192 - DNA, 20 bp, Artificial Sequence
  chemically synthesized
ctgcgatggcgggctcgatg

SEQ ID NO: 46193 - DNA, 20 bp, Artificial Sequence
  chemically synthesized
ataactctgaccttacctca

SEQ ID NO: 46194 - DNA, 20 bp, Artificial Sequence
  chemically synthesized
aactctgaccttacctcatg

SEQ ID NO: 46195 - DNA, 20 bp, Artificial Sequence
  chemically synthesized
tggagtcactgtcaacccac

SEQ ID NO: 46196 - DNA, 20 bp, Artificial Sequence
  chemically synthesized
gttgcactgtctttgtgcac

SEQ ID NO: 46197 - DNA, 20 bp, Artificial Sequence
  chemically synthesized
gtctttgtgcactggctctc

SEQ ID NO: 46198 - DNA, 20 bp, Artificial Sequence
  chemically synthesized
ctttgtgcactggctctctg

SEQ ID NO: 46199 - DNA, 20 bp, Artificial Sequence
  chemically synthesized
gtgcactggctctctggagt

SEQ ID NO: 46200 - DNA, 20 bp, Artificial Sequence
  chemically synthesized
tgcactggctctctggagtg

SEQ ID NO: 46201 - DNA, 20 bp, Artificial Sequence
  chemically synthesized
gagtgaggtctttgcaaaca

SEQ ID NO: 46202 - DNA, 20 bp, Artificial Sequence
  chemically synthesized
tgaggtctttgcaaacaaag

SEQ ID NO: 46203 - DNA, 20 bp, Artificial Sequence
  chemically synthesized
gtctttgcaaacaaagtgga

SEQ ID NO: 46204 - DNA, 20 bp, Artificial Sequence
  chemically synthesized
ctttgcaaacaaagtggaaa

SEQ ID NO: 46205 - DNA, 20 bp, Artificial Sequence
  chemically synthesized
agtggaaagagcatcaactt

SEQ ID NO: 46206 - DNA, 20 bp, Artificial Sequence
  chemically synthesized
agagcatcaactttggactc

SEQ ID NO: 46207 - DNA, 20 bp, Artificial Sequence
  chemically synthesized
caactttggactccagcacc

SEQ ID NO: 46208 - DNA, 20 bp, Artificial Sequence
  chemically synthesized
tggactccagcacctagatt

SEQ ID NO: 46209 - DNA, 20 bp, Artificial Sequence
  chemically synthesized
gactccagcacctagattca

SEQ ID NO: 46210 - DNA, 20 bp, Artificial Sequence
  chemically synthesized
tccagcacctagattcagag

SEQ ID NO: 46211 - DNA, 20 bp, Artificial Sequence
  chemically synthesized
ccagcacctagattcagagc

SEQ ID NO: 46212 - DNA, 20 bp, Artificial Sequence
  chemically synthesized
tcagagcaggccatttcact

SEQ ID NO: 46213 - DNA, 20 bp, Artificial Sequence
  chemically synthesized
ggaatctgctgtgcatctgc

SEQ ID NO: 46214 - DNA, 20 bp, Artificial Sequence
  chemically synthesized
gaatctgctgtgcatctgca

SEQ ID NO: 46215 - DNA, 20 bp, Artificial Sequence
  chemically synthesized
aatctgctgtgcatctgcaa

SEQ ID NO: 46216 - DNA, 20 bp, Artificial Sequence
  chemically synthesized
tctgctgtgcatctgcaagg

SEQ ID NO: 46217 - DNA, 20 bp, Artificial Sequence
  chemically synthesized
ctgctgtgcatctgcaaggg

SEQ ID NO: 46218 - DNA, 20 bp, Artificial Sequence
  chemically synthesized
aattcgcctttgtttcttcc

SEQ ID NO: 46219 - DNA, 20 bp, Artificial Sequence
  chemically synthesized
ttgtttcttcccagtatcga

SEQ ID NO: 46220 - DNA, 20 bp, Artificial Sequence
  chemically synthesized
cccagtatcgacagcccttc

SEQ ID NO: 46221 - DNA, 20 bp, Artificial Sequence
  chemically synthesized
gtatcgacagcccttccaga

SEQ ID NO: 46222 - DNA, 20 bp, Artificial Sequence
  chemically synthesized
atcgacagcccttccagaaa

SEQ ID NO: 46223 - DNA, 20 bp, Artificial Sequence
  chemically synthesized
acagcccttccagaaagagc

SEQ ID NO: 46224 - DNA, 20 bp, Artificial Sequence
  chemically synthesized
tcatgccacatgtacaatct

SEQ ID NO: 46225 - DNA, 20 bp, Artificial Sequence
  chemically synthesized
catgccacatgtacaatctg

SEQ ID NO: 46226 - DNA, 20 bp, Artificial Sequence
  chemically synthesized
ccacatgtacaatctgaggc

SEQ ID NO: 46227 - DNA, 20 bp, Artificial Sequence
  chemically synthesized
cacatgtacaatctgaggcc

SEQ ID NO: 46228 - DNA, 20 bp, Artificial Sequence
  chemically synthesized
catgtacaatctgaggccag

SEQ ID NO: 46229 - DNA, 20 bp, Artificial Sequence
  chemically synthesized
ccccttttcatcctcctgcc

SEQ ID NO: 46230 - DNA, 20 bp, Artificial Sequence
  chemically synthesized
tcctcctgcctggtacacaa

SEQ ID NO: 46231 - DNA, 20 bp, Artificial Sequence
  chemically synthesized
cctcctgcctggtacacaat

SEQ ID NO: 46232 - DNA, 20 bp, Artificial Sequence
  chemically synthesized
ggtacacaataggtgtttac

SEQ ID NO: 46233 - DNA, 20 bp, Artificial Sequence
  chemically synthesized
gtgtttactggatgcttgtc

SEQ ID NO: 46234 - DNA, 20 bp, Artificial Sequence
  chemically synthesized
tccagttgatttcttgaaca

SEQ ID NO: 46235 - DNA, 20 bp, Artificial Sequence
  chemically synthesized
ttcttgaacatggtgtgtaa

SEQ ID NO: 46236 - DNA, 20 bp, Artificial Sequence
  chemically synthesized
tcttgaacatggtgtgtaaa

SEQ ID NO: 46237 - DNA, 20 bp, Artificial Sequence
  chemically synthesized
tctttgcaaattgaatcttc

SEQ ID NO: 46238 - DNA, 20 bp, Artificial Sequence
  chemically synthesized
tgcaaattgaatcttctgga

SEQ ID NO: 46239 - DNA, 20 bp, Artificial Sequence
  chemically synthesized
attgaatcttctggaaagct

SEQ ID NO: 46240 - DNA, 20 bp, Artificial Sequence
  chemically synthesized
agctgagcttgtgcctacca

SEQ ID NO: 46241 - DNA, 20 bp, Artificial Sequence
  chemically synthesized
acttaaaacctgaatctttg

SEQ ID NO: 46242 - DNA, 20 bp, Artificial Sequence
  chemically synthesized
taaatcccttgaaatgcatg

SEQ ID NO: 46243 - DNA, 20 bp, Artificial Sequence
  chemically synthesized
aaatcccttgaaatgcatgt

SEQ ID NO: 46244 - DNA, 20 bp, Artificial Sequence
  chemically synthesized
cccttgaaatgcatgtaggc

SEQ ID NO: 46245 - DNA, 20 bp, Artificial Sequence
  chemically synthesized
gcatgtaggctggacatcaa

SEQ ID NO: 46246 - DNA, 20 bp, Artificial Sequence
  chemically synthesized
gtaggctggacatcaaaagc

SEQ ID NO: 46247 - DNA, 20 bp, Artificial Sequence
  chemically synthesized
caaaagcaagcaatctcttc

SEQ ID NO: 46248 - DNA, 20 bp, Artificial Sequence
  chemically synthesized
aaaagcaagcaatctcttca

SEQ ID NO: 46249 - DNA, 20 bp, Artificial Sequence
  chemically synthesized
aagcaagcaatctcttcaag

SEQ ID NO: 46250 - DNA, 20 bp, Artificial Sequence
  chemically synthesized
caagcaatctcttcaaggag

SEQ ID NO: 46251 - DNA, 20 bp, Artificial Sequence
  chemically synthesized
caatctcttcaaggagcagc

SEQ ID NO: 46252 - DNA, 20 bp, Artificial Sequence
  chemically synthesized
ctcttcaaggagcagctagt

SEQ ID NO: 46253 - DNA, 20 bp, Artificial Sequence
  chemically synthesized
tcaaggagcagctagttggt

SEQ ID NO: 46254 - DNA, 20 bp, Artificial Sequence
  chemically synthesized
caaggagcagctagttggta

SEQ ID NO: 46255 - DNA, 20 bp, Artificial Sequence
  chemically synthesized
gagcagctagttggtaaggt

SEQ ID NO: 46256 - DNA, 20 bp, Artificial Sequence
  chemically synthesized
tagttggtaaggtcagtgtg

SEQ ID NO: 46257 - DNA, 20 bp, Artificial Sequence
  chemically synthesized
agttggtaaggtcagtgtgc

SEQ ID NO: 46258 - DNA, 20 bp, Artificial Sequence
  chemically synthesized
gttggtaaggtcagtgtgca

SEQ ID NO: 46259 - DNA, 20 bp, Artificial Sequence
  chemically synthesized
gtcagtgtgcagggtgcata

SEQ ID NO: 46260 - DNA, 20 bp, Artificial Sequence
  chemically synthesized
tcagtgtgcagggtgcataa

SEQ ID NO: 46261 - DNA, 20 bp, Artificial Sequence
  chemically synthesized
cagtgtgcagggtgcataaa

SEQ ID NO: 46262 - DNA, 20 bp, Artificial Sequence
  chemically synthesized
tgtgcagggtgcataaaggg

SEQ ID NO: 46263 - DNA, 20 bp, Artificial Sequence
  chemically synthesized
tgcagggtgcataaagggca

SEQ ID NO: 46264 - DNA, 20 bp, Artificial Sequence
  chemically synthesized
gcagggtgcataaagggcag

SEQ ID NO: 46265 - DNA, 20 bp, Artificial Sequence
  chemically synthesized
ggtgcataaagggcagaggc

SEQ ID NO: 46266 - DNA, 20 bp, Artificial Sequence
  chemically synthesized
tgcataaagggcagaggccg

SEQ ID NO: 46267 - DNA, 20 bp, Artificial Sequence
  chemically synthesized
gcataaagggcagaggccgg

SEQ ID NO: 46268 - DNA, 20 bp, Artificial Sequence
  chemically synthesized
cataaagggcagaggccgga

SEQ ID NO: 46269 - DNA, 20 bp, Artificial Sequence
  chemically synthesized
ataaagggcagaggccggag

SEQ ID NO: 46270 - DNA, 20 bp, Artificial Sequence
  chemically synthesized
taaagggcagaggccggagg

SEQ ID NO: 46271 - DNA, 20 bp, Artificial Sequence
  chemically synthesized
ggcagaggccggagggggtc

SEQ ID NO: 46272 - DNA, 20 bp, Artificial Sequence
  chemically synthesized
gcagaggccggagggggtcc

SEQ ID NO: 46273 - DNA, 20 bp, Artificial Sequence
  chemically synthesized
ggccggagggggtccaggct

SEQ ID NO: 46274 - DNA, 20 bp, Artificial Sequence
  chemically synthesized
gagggggtccaggctaagtt

SEQ ID NO: 46275 - DNA, 20 bp, Artificial Sequence
  chemically synthesized
ggggtccaggctaagtttag

SEQ ID NO: 46276 - DNA, 20 bp, Artificial Sequence
  chemically synthesized
gggtccaggctaagtttaga

SEQ ID NO: 46277 - DNA, 20 bp, Artificial Sequence
  chemically synthesized
ggctaagtttagaaggctgc

SEQ ID NO: 46278 - DNA, 20 bp, Artificial Sequence
  chemically synthesized
gctaagtttagaaggctgcc

SEQ ID NO: 46279 - DNA, 20 bp, Artificial Sequence
  chemically synthesized
gtttagaaggctgccaggtt

SEQ ID NO: 46280 - DNA, 20 bp, Artificial Sequence
  chemically synthesized
tttagaaggctgccaggtta

SEQ ID NO: 46281 - DNA, 20 bp, Artificial Sequence
  chemically synthesized
gaaggctgccaggttaaggc

SEQ ID NO: 46282 - DNA, 20 bp, Artificial Sequence
  chemically synthesized
ggctgccaggttaaggccag

SEQ ID NO: 46283 - DNA, 20 bp, Artificial Sequence
  chemically synthesized
gccaggttaaggccagtgga

SEQ ID NO: 46284 - DNA, 20 bp, Artificial Sequence
  chemically synthesized
taaggccagtggaaagaatt

SEQ ID NO: 46285 - DNA, 20 bp, Artificial Sequence
  chemically synthesized
ggccagtggaaagaattcgg

SEQ ID NO: 46286 - DNA, 20 bp, Artificial Sequence
  chemically synthesized
gccagtggaaagaattcggt

SEQ ID NO: 46287 - DNA, 20 bp, Artificial Sequence
  chemically synthesized
agtggaaagaattcggtggg

SEQ ID NO: 46288 - DNA, 20 bp, Artificial Sequence
  chemically synthesized
gaaagaattcggtgggcagc

SEQ ID NO: 46289 - DNA, 20 bp, Artificial Sequence
  chemically synthesized
aaagaattcggtgggcagcg

SEQ ID NO: 46290 - DNA, 20 bp, Artificial Sequence
  chemically synthesized
agaattcggtgggcagcgag

SEQ ID NO: 46291 - DNA, 20 bp, Artificial Sequence
  chemically synthesized
ggtgggcagcgaggagtcca

SEQ ID NO: 46292 - DNA, 20 bp, Artificial Sequence
  chemically synthesized
gggcagcgaggagtccacag

SEQ ID NO: 46293 - DNA, 20 bp, Artificial Sequence
  chemically synthesized
ggcagcgaggagtccacagt

SEQ ID NO: 46294 - DNA, 20 bp, Artificial Sequence
  chemically synthesized
agtccacagtaggattgatt

SEQ ID NO: 46295 - DNA, 20 bp, Artificial Sequence
  chemically synthesized
ccacagtaggattgattcag

SEQ ID NO: 46296 - DNA, 20 bp, Artificial Sequence
  chemically synthesized
gattgattcagaagtctcac

SEQ ID NO: 46297 - DNA, 20 bp, Artificial Sequence
  chemically synthesized
gattcagaagtctcactggt

SEQ ID NO: 46298 - DNA, 20 bp, Artificial Sequence
  chemically synthesized
tcagaagtctcactggtcag

SEQ ID NO: 46299 - DNA, 20 bp, Artificial Sequence
  chemically synthesized
cagaagtctcactggtcagc

SEQ ID NO: 46300 - DNA, 20 bp, Artificial Sequence
  chemically synthesized
gaagtctcactggtcagcag

SEQ ID NO: 46301 - DNA, 20 bp, Artificial Sequence
  chemically synthesized
ctcactggtcagcaggagac

SEQ ID NO: 46302 - DNA, 20 bp, Artificial Sequence
  chemically synthesized
tcactggtcagcaggagaca

SEQ ID NO: 46303 - DNA, 20 bp, Artificial Sequence
  chemically synthesized
ctggtcagcaggagacaagg

SEQ ID NO: 46304 - DNA, 20 bp, Artificial Sequence
  chemically synthesized
agcaggagacaaggtggacc

SEQ ID NO: 46305 - DNA, 20 bp, Artificial Sequence
  chemically synthesized
gcaggagacaaggtggaccc

SEQ ID NO: 46306 - DNA, 20 bp, Artificial Sequence
  chemically synthesized
tggacccaggaaacactgaa

SEQ ID NO: 46307 - DNA, 20 bp, Artificial Sequence
  chemically synthesized
ggacccaggaaacactgaaa

SEQ ID NO: 46308 - DNA, 20 bp, Artificial Sequence
  chemically synthesized
cccaggaaacactgaaaagg

SEQ ID NO: 46309 - DNA, 20 bp, Artificial Sequence
  chemically synthesized
ccaggaaacactgaaaaggt

SEQ ID NO: 46310 - DNA, 20 bp, Artificial Sequence
  chemically synthesized
aaacactgaaaaggtgggcc

SEQ ID NO: 46311 - DNA, 20 bp, Artificial Sequence
  chemically synthesized
cactgaaaaggtgggcccgg

SEQ ID NO: 46312 - DNA, 20 bp, Artificial Sequence
  chemically synthesized
aaggtgggcccggcagaact

SEQ ID NO: 46313 - DNA, 20 bp, Artificial Sequence
  chemically synthesized
ggtgggcccggcagaacttg

SEQ ID NO: 46314 - DNA, 20 bp, Artificial Sequence
  chemically synthesized
gcccggcagaacttggagtc

SEQ ID NO: 46315 - DNA, 20 bp, Artificial Sequence
  chemically synthesized
ttggagtctggcatcccacg

SEQ ID NO: 46316 - DNA, 20 bp, Artificial Sequence
  chemically synthesized
tggagtctggcatcccacgc

SEQ ID NO: 46317 - DNA, 20 bp, Artificial Sequence
  chemically synthesized
ggagtctggcatcccacgca

SEQ ID NO: 46318 - DNA, 20 bp, Artificial Sequence
  chemically synthesized
tctggcatcccacgcagggt

SEQ ID NO: 46319 - DNA, 20 bp, Artificial Sequence
  chemically synthesized
tggcatcccacgcagggtga

SEQ ID NO: 46320 - DNA, 20 bp, Artificial Sequence
  chemically synthesized
ggcatcccacgcagggtgag

SEQ ID NO: 46321 - DNA, 20 bp, Artificial Sequence
  chemically synthesized
atcccacgcagggtgagagg

SEQ ID NO: 46322 - DNA, 20 bp, Artificial Sequence
  chemically synthesized
tcccacgcagggtgagaggc

SEQ ID NO: 46323 - DNA, 20 bp, Artificial Sequence
  chemically synthesized
ccacgcagggtgagaggcgg

SEQ ID NO: 46324 - DNA, 20 bp, Artificial Sequence
  chemically synthesized
acgcagggtgagaggcggga

SEQ ID NO: 46325 - DNA, 20 bp, Artificial Sequence
  chemically synthesized
cgcagggtgagaggcgggag

SEQ ID NO: 46326 - DNA, 20 bp, Artificial Sequence
  chemically synthesized
cagggtgagaggcgggagag

SEQ ID NO: 46327 - DNA, 20 bp, Artificial Sequence
  chemically synthesized
agggtgagaggcgggagagg

SEQ ID NO: 46328 - DNA, 20 bp, Artificial Sequence
  chemically synthesized
ggtgagaggcgggagaggag

SEQ ID NO: 46329 - DNA, 20 bp, Artificial Sequence
  chemically synthesized
ggcgggagaggaggagcccc

SEQ ID NO: 46330 - DNA, 20 bp, Artificial Sequence
  chemically synthesized
gcgggagaggaggagcccct

SEQ ID NO: 46331 - DNA, 20 bp, Artificial Sequence
  chemically synthesized
cgggagaggaggagccccta

SEQ ID NO: 46332 - DNA, 20 bp, Artificial Sequence
  chemically synthesized
aggaggagcccctagggcgc

SEQ ID NO: 46333 - DNA, 20 bp, Artificial Sequence
  chemically synthesized
tagggcgccggcctgccttc

SEQ ID NO: 46334 - DNA, 20 bp, Artificial Sequence
  chemically synthesized
cgccggcctgccttccagcc

SEQ ID NO: 46335 - DNA, 20 bp, Artificial Sequence
  chemically synthesized
ggcctgccttccagcccagt

SEQ ID NO: 46336 - DNA, 20 bp, Artificial Sequence
  chemically synthesized
gcctgccttccagcccagtt

SEQ ID NO: 46337 - DNA, 20 bp, Artificial Sequence
  chemically synthesized
cttccagcccagttaggatt

SEQ ID NO: 46338 - DNA, 20 bp, Artificial Sequence
  chemically synthesized
ttccagcccagttaggattt

SEQ ID NO: 46339 - DNA, 20 bp, Artificial Sequence
  chemically synthesized
ccagcccagttaggatttgg

SEQ ID NO: 46340 - DNA, 20 bp, Artificial Sequence
  chemically synthesized
gcgcgtaatctgacgctgtt

SEQ ID NO: 46341 - DNA, 20 bp, Artificial Sequence
  chemically synthesized
cgcgtaatctgacgctgttt

SEQ ID NO: 46342 - DNA, 20 bp, Artificial Sequence
  chemically synthesized
gcgtaatctgacgctgtttg

SEQ ID NO: 46343 - DNA, 20 bp, Artificial Sequence
  chemically synthesized
gtaatctgacgctgtttggg

SEQ ID NO: 46344 - DNA, 20 bp, Artificial Sequence
  chemically synthesized
taatctgacgctgtttgggg

SEQ ID NO: 46345 - DNA, 20 bp, Artificial Sequence
  chemically synthesized
aatctgacgctgtttgggga

SEQ ID NO: 46346 - DNA, 20 bp, Artificial Sequence
  chemically synthesized
tgacgctgtttggggagggc

SEQ ID NO: 46347 - DNA, 20 bp, Artificial Sequence
  chemically synthesized
gacgctgtttggggagggcg

SEQ ID NO: 46348 - DNA, 20 bp, Artificial Sequence
  chemically synthesized
gaggccgaaacctgatcctc

SEQ ID NO: 46349 - DNA, 20 bp, Artificial Sequence
  chemically synthesized
cgaaacctgatcctccagtc

SEQ ID NO: 46350 - DNA, 20 bp, Artificial Sequence
  chemically synthesized
gaaacctgatcctccagtcc

SEQ ID NO: 46351 - DNA, 20 bp, Artificial Sequence
  chemically synthesized
aaacctgatcctccagtccg

SEQ ID NO: 46352 - DNA, 20 bp, Artificial Sequence
  chemically synthesized
aacctgatcctccagtccgg

SEQ ID NO: 46353 - DNA, 20 bp, Artificial Sequence
  chemically synthesized
gggttccgttaatgtttaat

SEQ ID NO: 46354 - DNA, 20 bp, Artificial Sequence
  chemically synthesized
tccgttaatgtttaatcaga

SEQ ID NO: 46355 - DNA, 20 bp, Artificial Sequence
  chemically synthesized
ccgttaatgtttaatcagat

SEQ ID NO: 46356 - DNA, 20 bp, Artificial Sequence
  chemically synthesized
aatcagataggatcgtccga

SEQ ID NO: 46357 - DNA, 20 bp, Artificial Sequence
  chemically synthesized
atcagataggatcgtccgat

SEQ ID NO: 46358 - DNA, 20 bp, Artificial Sequence
  chemically synthesized
tcagataggatcgtccgatg

SEQ ID NO: 46359 - DNA, 20 bp, Artificial Sequence
  chemically synthesized
aggatcgtccgatggggctc

SEQ ID NO: 46360 - DNA, 20 bp, Artificial Sequence
  chemically synthesized
atcgtccgatggggctctgg

SEQ ID NO: 46361 - DNA, 20 bp, Artificial Sequence
  chemically synthesized
gtggcgtgatctgcgcgccc

SEQ ID NO: 46362 - DNA, 20 bp, Artificial Sequence
  chemically synthesized
tggcgtgatctgcgcgcccc

SEQ ID NO: 46363 - DNA, 20 bp, Artificial Sequence
  chemically synthesized
atctgcgcgccccaggcgtc

SEQ ID NO: 46364 - DNA, 20 bp, Artificial Sequence
  chemically synthesized
ggcgtcaagcacccacaccc

SEQ ID NO: 46365 - DNA, 20 bp, Artificial Sequence
  chemically synthesized
gtcaagcacccacaccctag

SEQ ID NO: 46366 - DNA, 20 bp, Artificial Sequence
  chemically synthesized
tcaagcacccacaccctaga

SEQ ID NO: 46367 - DNA, 20 bp, Artificial Sequence
  chemically synthesized
cacaccctagaaggtttccg

SEQ ID NO: 46368 - DNA, 20 bp, Artificial Sequence
  chemically synthesized
aaggtttccgcagcgacgtc

SEQ ID NO: 46369 - DNA, 20 bp, Artificial Sequence
  chemically synthesized
aggtttccgcagcgacgtcg

SEQ ID NO: 46370 - DNA, 20 bp, Artificial Sequence
  chemically synthesized
cagcgacgtcgaggcgctca

SEQ ID NO: 46371 - DNA, 20 bp, Artificial Sequence
  chemically synthesized
cgtcgaggcgctcatggttg

SEQ ID NO: 46372 - DNA, 20 bp, Artificial Sequence
  chemically synthesized
gtcgaggcgctcatggttgc

SEQ ID NO: 46373 - DNA, 20 bp, Artificial Sequence
  chemically synthesized
gaggcgctcatggttgcagg

SEQ ID NO: 46374 - DNA, 20 bp, Artificial Sequence
  chemically synthesized
aggcgctcatggttgcaggc

SEQ ID NO: 46375 - DNA, 20 bp, Artificial Sequence
  chemically synthesized
tgcaggcgggcgccgccgtt

SEQ ID NO: 46376 - DNA, 20 bp, Artificial Sequence
  chemically synthesized
gcgggcgccgccgttcagtt

SEQ ID NO: 46377 - DNA, 20 bp, Artificial Sequence
  chemically synthesized
cgggcgccgccgttcagttc

SEQ ID NO: 46378 - DNA, 20 bp, Artificial Sequence
  chemically synthesized
gggcgccgccgttcagttca

SEQ ID NO: 46379 - DNA, 20 bp, Artificial Sequence
  chemically synthesized
cgccgttcagttcagggtct

SEQ ID NO: 46380 - DNA, 20 bp, Artificial Sequence
  chemically synthesized
ttcagttcagggtctgagcc

SEQ ID NO: 46381 - DNA, 20 bp, Artificial Sequence
  chemically synthesized
cagttcagggtctgagcctg

SEQ ID NO: 46382 - DNA, 20 bp, Artificial Sequence
  chemically synthesized
agttcagggtctgagcctgg

SEQ ID NO: 46383 - DNA, 20 bp, Artificial Sequence
  chemically synthesized
ttcagggtctgagcctggag

SEQ ID NO: 46384 - DNA, 20 bp, Artificial Sequence
  chemically synthesized
gggtctgagcctggaggagt

SEQ ID NO: 46385 - DNA, 20 bp, Artificial Sequence
  chemically synthesized
ctgagcctggaggagtgagc

SEQ ID NO: 46386 - DNA, 20 bp, Artificial Sequence
  chemically synthesized
tgagcctggaggagtgagcc

SEQ ID NO: 46387 - DNA, 20 bp, Artificial Sequence
  chemically synthesized
gcctggaggagtgagccagg

SEQ ID NO: 46388 - DNA, 20 bp, Artificial Sequence
  chemically synthesized
ggaggagtgagccaggcagt

SEQ ID NO: 46389 - DNA, 20 bp, Artificial Sequence
  chemically synthesized
agtgagccaggcagtgagac

SEQ ID NO: 46390 - DNA, 20 bp, Artificial Sequence
  chemically synthesized
gccaggcagtgagactggct

SEQ ID NO: 46391 - DNA, 20 bp, Artificial Sequence
  chemically synthesized
ccaggcagtgagactggctc

SEQ ID NO: 46392 - DNA, 20 bp, Artificial Sequence
  chemically synthesized
ggcagtgagactggctcggg

SEQ ID NO: 46393 - DNA, 20 bp, Artificial Sequence
  chemically synthesized
gcagtgagactggctcgggc

SEQ ID NO: 46394 - DNA, 20 bp, Artificial Sequence
  chemically synthesized
tgagactggctcgggcgggc

SEQ ID NO: 46395 - DNA, 20 bp, Artificial Sequence
  chemically synthesized
gagactggctcgggcgggcc

SEQ ID NO: 46396 - DNA, 20 bp, Artificial Sequence
  chemically synthesized
cgggccgggacgcgtcgttg

SEQ ID NO: 46397 - DNA, 20 bp, Artificial Sequence
  chemically synthesized
gccgggacgcgtcgttgcag

SEQ ID NO: 46398 - DNA, 20 bp, Artificial Sequence
  chemically synthesized
gggacgcgtcgttgcagcag

SEQ ID NO: 46399 - DNA, 20 bp, Artificial Sequence
  chemically synthesized
gtcgttgcagcagcggctcc

SEQ ID NO: 46400 - DNA, 20 bp, Artificial Sequence
  chemically synthesized
cagcagcggctcccagctcc

SEQ ID NO: 46401 - DNA, 20 bp, Artificial Sequence
  chemically synthesized
agcggctcccagctcccagc

SEQ ID NO: 46402 - DNA, 20 bp, Artificial Sequence
  chemically synthesized
gcggctcccagctcccagcc

SEQ ID NO: 46403 - DNA, 20 bp, Artificial Sequence
  chemically synthesized
cgcgccctgctcctgaactt

SEQ ID NO: 46404 - DNA, 20 bp, Artificial Sequence
  chemically synthesized
cctgaacttcagctcctgca

SEQ ID NO: 46405 - DNA, 20 bp, Artificial Sequence
  chemically synthesized
tgcacagtcctccccaccgc

SEQ ID NO: 46406 - DNA, 20 bp, Artificial Sequence
  chemically synthesized
gcacagtcctccccaccgca

SEQ ID NO: 46407 - DNA, 20 bp, Artificial Sequence
  chemically synthesized
tcctccccaccgcaaggctc

SEQ ID NO: 46408 - DNA, 20 bp, Artificial Sequence
  chemically synthesized
cctccccaccgcaaggctca

SEQ ID NO: 46409 - DNA, 20 bp, Artificial Sequence
  chemically synthesized
cgcaaggctcaaggcgccgc

SEQ ID NO: 46410 - DNA, 20 bp, Artificial Sequence
  chemically synthesized
ggctcaaggcgccgccggcg

SEQ ID NO: 46411 - DNA, 20 bp, Artificial Sequence
  chemically synthesized
ccgccggcgtggaccgcgca

SEQ ID NO: 46412 - DNA, 20 bp, Artificial Sequence
  chemically synthesized
cgtggaccgcgcacggcctc

SEQ ID NO: 46413 - DNA, 20 bp, Artificial Sequence
  chemically synthesized
gtggaccgcgcacggcctct

SEQ ID NO: 46414 - DNA, 20 bp, Artificial Sequence
  chemically synthesized
cggcctctaggtctcctcgc

SEQ ID NO: 46415 - DNA, 20 bp, Artificial Sequence
  chemically synthesized
ggcctctaggtctcctcgcc

SEQ ID NO: 46416 - DNA, 20 bp, Artificial Sequence
  chemically synthesized
tctaggtctcctcgccagga

SEQ ID NO: 46417 - DNA, 20 bp, Artificial Sequence
  chemically synthesized
caggacagcaacctctcccc

SEQ ID NO: 46418 - DNA, 20 bp, Artificial Sequence
  chemically synthesized
aacctctcccctggccctca

SEQ ID NO: 46419 - DNA, 20 bp, Artificial Sequence
  chemically synthesized
acctctcccctggccctcat

SEQ ID NO: 46420 - DNA, 20 bp, Artificial Sequence
  chemically synthesized
ctggccctcatgggcaccgt

SEQ ID NO: 46421 - DNA, 20 bp, Artificial Sequence
  chemically synthesized
ctcatgggcaccgtcagctc

SEQ ID NO: 46422 - DNA, 20 bp, Artificial Sequence
  chemically synthesized
tcatgggcaccgtcagctcc

SEQ ID NO: 46423 - DNA, 20 bp, Artificial Sequence
  chemically synthesized
tgggcaccgtcagctccagg

SEQ ID NO: 46424 - DNA, 20 bp, Artificial Sequence
  chemically synthesized
ccgtcagctccaggcggtcc

SEQ ID NO: 46425 - DNA, 20 bp, Artificial Sequence
  chemically synthesized
tcagctccaggcggtcctgg

SEQ ID NO: 46426 - DNA, 20 bp, Artificial Sequence
  chemically synthesized
gctgctgctgctgctgctcc

SEQ ID NO: 46427 - DNA, 20 bp, Artificial Sequence
  chemically synthesized
ctgctgctgctgctgctcct

SEQ ID NO: 46428 - DNA, 20 bp, Artificial Sequence
  chemically synthesized
gctgctgctcctgggtcccg

SEQ ID NO: 46429 - DNA, 20 bp, Artificial Sequence
  chemically synthesized
ctgctgctcctgggtcccgc

SEQ ID NO: 46430 - DNA, 20 bp, Artificial Sequence
  chemically synthesized
gtcccgcgggcgcccgtgcg

SEQ ID NO: 46431 - DNA, 20 bp, Artificial Sequence
  chemically synthesized
tcccgcgggcgcccgtgcgc

SEQ ID NO: 46432 - DNA, 20 bp, Artificial Sequence
  chemically synthesized
ccgcgggcgcccgtgcgcag

SEQ ID NO: 46433 - DNA, 20 bp, Artificial Sequence
  chemically synthesized
cgcgggcgcccgtgcgcagg

SEQ ID NO: 46434 - DNA, 20 bp, Artificial Sequence
  chemically synthesized
gcgcccgtgcgcaggaggac

SEQ ID NO: 46435 - DNA, 20 bp, Artificial Sequence
  chemically synthesized
cgcccgtgcgcaggaggacg

SEQ ID NO: 46436 - DNA, 20 bp, Artificial Sequence
  chemically synthesized
cgtgcgcaggaggacgagga

SEQ ID NO: 46437 - DNA, 20 bp, Artificial Sequence
  chemically synthesized
aggacgaggacggcgactac

SEQ ID NO: 46438 - DNA, 20 bp, Artificial Sequence
  chemically synthesized
ggacgaggacggcgactacg

SEQ ID NO: 46439 - DNA, 20 bp, Artificial Sequence
  chemically synthesized
acgaggacggcgactacgag

SEQ ID NO: 46440 - DNA, 20 bp, Artificial Sequence
  chemically synthesized
ggacggcgactacgaggagc

SEQ ID NO: 46441 - DNA, 20 bp, Artificial Sequence
  chemically synthesized
cgactacgaggagctggtgc

SEQ ID NO: 46442 - DNA, 20 bp, Artificial Sequence
  chemically synthesized
tggtgctagccttgcgttcc

SEQ ID NO: 46443 - DNA, 20 bp, Artificial Sequence
  chemically synthesized
ggtgctagccttgcgttccg

SEQ ID NO: 46444 - DNA, 20 bp, Artificial Sequence
  chemically synthesized
tgctagccttgcgttccgag

SEQ ID NO: 46445 - DNA, 20 bp, Artificial Sequence
  chemically synthesized
gctagccttgcgttccgagg

SEQ ID NO: 46446 - DNA, 20 bp, Artificial Sequence
  chemically synthesized
gccttgcgttccgaggagga

SEQ ID NO: 46447 - DNA, 20 bp, Artificial Sequence
  chemically synthesized
gcgttccgaggaggacggcc

SEQ ID NO: 46448 - DNA, 20 bp, Artificial Sequence
  chemically synthesized
cgaggaggacggcctggccg

SEQ ID NO: 46449 - DNA, 20 bp, Artificial Sequence
  chemically synthesized
acggcctggccgaagcaccc

SEQ ID NO: 46450 - DNA, 20 bp, Artificial Sequence
  chemically synthesized
ctggccgaagcacccgagca

SEQ ID NO: 46451 - DNA, 20 bp, Artificial Sequence
  chemically synthesized
agcacccgagcacggaacca

SEQ ID NO: 46452 - DNA, 20 bp, Artificial Sequence
  chemically synthesized
ccaccttccaccgctgcgcc

SEQ ID NO: 46453 - DNA, 20 bp, Artificial Sequence
  chemically synthesized
caccttccaccgctgcgcca

SEQ ID NO: 46454 - DNA, 20 bp, Artificial Sequence
  chemically synthesized
tccaccgctgcgccaaggtg

SEQ ID NO: 46455 - DNA, 20 bp, Artificial Sequence
  chemically synthesized
ccaccgctgcgccaaggtgc

SEQ ID NO: 46456 - DNA, 20 bp, Artificial Sequence
  chemically synthesized
gctgcgccaaggtgcgggtg

SEQ ID NO: 46457 - DNA, 20 bp, Artificial Sequence
  chemically synthesized
ctgcgccaaggtgcgggtgt

SEQ ID NO: 46458 - DNA, 20 bp, Artificial Sequence
  chemically synthesized
tgcgccaaggtgcgggtgta

SEQ ID NO: 46459 - DNA, 20 bp, Artificial Sequence
  chemically synthesized
ccaaggtgcgggtgtaggga

SEQ ID NO: 46460 - DNA, 20 bp, Artificial Sequence
  chemically synthesized
caaggtgcgggtgtagggat

SEQ ID NO: 46461 - DNA, 20 bp, Artificial Sequence
  chemically synthesized
aggtgcgggtgtagggatgg

SEQ ID NO: 46462 - DNA, 20 bp, Artificial Sequence
  chemically synthesized
ggtgcgggtgtagggatggg

SEQ ID NO: 46463 - DNA, 20 bp, Artificial Sequence
  chemically synthesized
cgggtgtagggatgggaggc

SEQ ID NO: 46464 - DNA, 20 bp, Artificial Sequence
  chemically synthesized
gggtgtagggatgggaggcc

SEQ ID NO: 46465 - DNA, 20 bp, Artificial Sequence
  chemically synthesized
ggtgtagggatgggaggccg

SEQ ID NO: 46466 - DNA, 20 bp, Artificial Sequence
  chemically synthesized
gggaggccggggcgaacccg

SEQ ID NO: 46467 - DNA, 20 bp, Artificial Sequence
  chemically synthesized
ggccggggcgaacccgcagc

SEQ ID NO: 46468 - DNA, 20 bp, Artificial Sequence
  chemically synthesized
gccggggcgaacccgcagcc

SEQ ID NO: 46469 - DNA, 20 bp, Artificial Sequence
  chemically synthesized
gggcgaacccgcagccggga

SEQ ID NO: 46470 - DNA, 20 bp, Artificial Sequence
  chemically synthesized
aacccgcagccgggacggtg

SEQ ID NO: 46471 - DNA, 20 bp, Artificial Sequence
  chemically synthesized
ggtgcggtgctgtttcctct

SEQ ID NO: 46472 - DNA, 20 bp, Artificial Sequence
  chemically synthesized
gtgcggtgctgtttcctctc

SEQ ID NO: 46473 - DNA, 20 bp, Artificial Sequence
  chemically synthesized
tgctgtttcctctcgggcct

SEQ ID NO: 46474 - DNA, 20 bp, Artificial Sequence
  chemically synthesized
gcctcagtttccccccatgt

SEQ ID NO: 46475 - DNA, 20 bp, Artificial Sequence
  chemically synthesized
ctcagtttccccccatgtaa

SEQ ID NO: 46476 - DNA, 20 bp, Artificial Sequence
  chemically synthesized
cagtttccccccatgtaaga

SEQ ID NO: 46477 - DNA, 20 bp, Artificial Sequence
  chemically synthesized
agtttccccccatgtaagag

SEQ ID NO: 46478 - DNA, 20 bp, Artificial Sequence
  chemically synthesized
ttccccccatgtaagagagg

SEQ ID NO: 46479 - DNA, 20 bp, Artificial Sequence
  chemically synthesized
cccccatgtaagagaggaag

SEQ ID NO: 46480 - DNA, 20 bp, Artificial Sequence
  chemically synthesized
cccatgtaagagaggaagtg

SEQ ID NO: 46481 - DNA, 20 bp, Artificial Sequence
  chemically synthesized
gtaagagaggaagtggagtg

SEQ ID NO: 46482 - DNA, 20 bp, Artificial Sequence
  chemically synthesized
taagagaggaagtggagtgc

SEQ ID NO: 46483 - DNA, 20 bp, Artificial Sequence
  chemically synthesized
gaagtggagtgcaggtcgcc

SEQ ID NO: 46484 - DNA, 20 bp, Artificial Sequence
  chemically synthesized
aagtggagtgcaggtcgccg

SEQ ID NO: 46485 - DNA, 20 bp, Artificial Sequence
  chemically synthesized
agtggagtgcaggtcgccga

SEQ ID NO: 46486 - DNA, 20 bp, Artificial Sequence
  chemically synthesized
gtcgccgagggctcttcgct

SEQ ID NO: 46487 - DNA, 20 bp, Artificial Sequence
  chemically synthesized
ctcttcgcttggcacgatct

SEQ ID NO: 46488 - DNA, 20 bp, Artificial Sequence
  chemically synthesized
tcttcgcttggcacgatctt

SEQ ID NO: 46489 - DNA, 20 bp, Artificial Sequence
  chemically synthesized
cttcgcttggcacgatcttg

SEQ ID NO: 46490 - DNA, 20 bp, Artificial Sequence
  chemically synthesized
tggcacgatcttggggactg

SEQ ID NO: 46491 - DNA, 20 bp, Artificial Sequence
  chemically synthesized
ggcacgatcttggggactgc

SEQ ID NO: 46492 - DNA, 20 bp, Artificial Sequence
  chemically synthesized
cgatcttggggactgcaggc

SEQ ID NO: 46493 - DNA, 20 bp, Artificial Sequence
  chemically synthesized
gatcttggggactgcaggca

SEQ ID NO: 46494 - DNA, 20 bp, Artificial Sequence
  chemically synthesized
cttggggactgcaggcaagg

SEQ ID NO: 46495 - DNA, 20 bp, Artificial Sequence
  chemically synthesized
ggggactgcaggcaaggcgg

SEQ ID NO: 46496 - DNA, 20 bp, Artificial Sequence
  chemically synthesized
gggactgcaggcaaggcggc

SEQ ID NO: 46497 - DNA, 20 bp, Artificial Sequence
  chemically synthesized
ggactgcaggcaaggcggcg

SEQ ID NO: 46498 - DNA, 20 bp, Artificial Sequence
  chemically synthesized
gactgcaggcaaggcggcgg

SEQ ID NO: 46499 - DNA, 20 bp, Artificial Sequence
  chemically synthesized
ctgcaggcaaggcggcgggg

SEQ ID NO: 46500 - DNA, 20 bp, Artificial Sequence
  chemically synthesized
tgcaggcaaggcggcggggg

SEQ ID NO: 46501 - DNA, 20 bp, Artificial Sequence
  chemically synthesized
ggcaaggcggcgggggagga

SEQ ID NO: 46502 - DNA, 20 bp, Artificial Sequence
  chemically synthesized
gcaaggcggcgggggaggac

SEQ ID NO: 46503 - DNA, 20 bp, Artificial Sequence
  chemically synthesized
aggcggcgggggaggacggg

SEQ ID NO: 46504 - DNA, 20 bp, Artificial Sequence
  chemically synthesized
cggcgggggaggacgggtag

SEQ ID NO: 46505 - DNA, 20 bp, Artificial Sequence
  chemically synthesized
ggcgggggaggacgggtagt

SEQ ID NO: 46506 - DNA, 20 bp, Artificial Sequence
  chemically synthesized
gcgggggaggacgggtagtg

SEQ ID NO: 46507 - DNA, 20 bp, Artificial Sequence
  chemically synthesized
gggggaggacgggtagtggg

SEQ ID NO: 46508 - DNA, 20 bp, Artificial Sequence
  chemically synthesized
aggacgggtagtggggagca

SEQ ID NO: 46509 - DNA, 20 bp, Artificial Sequence
  chemically synthesized
acgggtagtggggagcacgg

SEQ ID NO: 46510 - DNA, 20 bp, Artificial Sequence
  chemically synthesized
gggtagtggggagcacggtg

SEQ ID NO: 46511 - DNA, 20 bp, Artificial Sequence
  chemically synthesized
gtagtggggagcacggtgga

SEQ ID NO: 46512 - DNA, 20 bp, Artificial Sequence
  chemically synthesized
gtggggagcacggtggagag

SEQ ID NO: 46513 - DNA, 20 bp, Artificial Sequence
  chemically synthesized
tggggagcacggtggagagc

SEQ ID NO: 46514 - DNA, 20 bp, Artificial Sequence
  chemically synthesized
ggggagcacggtggagagcg

SEQ ID NO: 46515 - DNA, 20 bp, Artificial Sequence
  chemically synthesized
agcacggtggagagcgggga

SEQ ID NO: 46516 - DNA, 20 bp, Artificial Sequence
  chemically synthesized
cggtggagagcggggacggc

SEQ ID NO: 46517 - DNA, 20 bp, Artificial Sequence
  chemically synthesized
agcggggacggccggctctt

SEQ ID NO: 46518 - DNA, 20 bp, Artificial Sequence
  chemically synthesized
gcggggacggccggctcttt

SEQ ID NO: 46519 - DNA, 20 bp, Artificial Sequence
  chemically synthesized
cggggacggccggctctttg

SEQ ID NO: 46520 - DNA, 20 bp, Artificial Sequence
  chemically synthesized
ccggctctttggggacttgc

SEQ ID NO: 46521 - DNA, 20 bp, Artificial Sequence
  chemically synthesized
cggctctttggggacttgct

SEQ ID NO: 46522 - DNA, 20 bp, Artificial Sequence
  chemically synthesized
ggctctttggggacttgctg

SEQ ID NO: 46523 - DNA, 20 bp, Artificial Sequence
  chemically synthesized
tggggacttgctggggcgtg

SEQ ID NO: 46524 - DNA, 20 bp, Artificial Sequence
  chemically synthesized
gggcgtgcggctgcgctatt

SEQ ID NO: 46525 - DNA, 20 bp, Artificial Sequence
  chemically synthesized
cgtgcggctgcgctattcag

SEQ ID NO: 46526 - DNA, 20 bp, Artificial Sequence
  chemically synthesized
gtgcggctgcgctattcagt

SEQ ID NO: 46527 - DNA, 20 bp, Artificial Sequence
  chemically synthesized
cggctgcgctattcagtggg

SEQ ID NO: 46528 - DNA, 20 bp, Artificial Sequence
  chemically synthesized
ggctgcgctattcagtggga

SEQ ID NO: 46529 - DNA, 20 bp, Artificial Sequence
  chemically synthesized
ctattcagtgggaaggttcg

SEQ ID NO: 46530 - DNA, 20 bp, Artificial Sequence
  chemically synthesized
tattcagtgggaaggttcgc

SEQ ID NO: 46531 - DNA, 20 bp, Artificial Sequence
  chemically synthesized
attcagtgggaaggttcgcg

SEQ ID NO: 46532 - DNA, 20 bp, Artificial Sequence
  chemically synthesized
agtgggaaggttcgcggggt

SEQ ID NO: 46533 - DNA, 20 bp, Artificial Sequence
  chemically synthesized
gtgggaaggttcgcggggtt

SEQ ID NO: 46534 - DNA, 20 bp, Artificial Sequence
  chemically synthesized
gggaaggttcgcggggttgg

SEQ ID NO: 46535 - DNA, 20 bp, Artificial Sequence
  chemically synthesized
gttcgcggggttgggagacc

SEQ ID NO: 46536 - DNA, 20 bp, Artificial Sequence
  chemically synthesized
tcgcggggttgggagacccg

SEQ ID NO: 46537 - DNA, 20 bp, Artificial Sequence
  chemically synthesized
cgcggggttgggagacccgg

SEQ ID NO: 46538 - DNA, 20 bp, Artificial Sequence
  chemically synthesized
ggttgggagacccggaggcc

SEQ ID NO: 46539 - DNA, 20 bp, Artificial Sequence
  chemically synthesized
gttgggagacccggaggccg

SEQ ID NO: 46540 - DNA, 20 bp, Artificial Sequence
  chemically synthesized
gggagacccggaggccgagg

SEQ ID NO: 46541 - DNA, 20 bp, Artificial Sequence
  chemically synthesized
ggagacccggaggccgagga

SEQ ID NO: 46542 - DNA, 20 bp, Artificial Sequence
  chemically synthesized
gagacccggaggccgaggaa

SEQ ID NO: 46543 - DNA, 20 bp, Artificial Sequence
  chemically synthesized
cccggaggccgaggaagggc

SEQ ID NO: 46544 - DNA, 20 bp, Artificial Sequence
  chemically synthesized
ggaggccgaggaagggcgag

SEQ ID NO: 46545 - DNA, 20 bp, Artificial Sequence
  chemically synthesized
aggccgaggaagggcgagca

SEQ ID NO: 46546 - DNA, 20 bp, Artificial Sequence
  chemically synthesized
aagggcgagcagagcactgc

SEQ ID NO: 46547 - DNA, 20 bp, Artificial Sequence
  chemically synthesized
agggcgagcagagcactgcc

SEQ ID NO: 46548 - DNA, 20 bp, Artificial Sequence
  chemically synthesized
cactgccaggatatcctgcc

SEQ ID NO: 46549 - DNA, 20 bp, Artificial Sequence
  chemically synthesized
gatatcctgcccagatttcc

SEQ ID NO: 46550 - DNA, 20 bp, Artificial Sequence
  chemically synthesized
tcccagtttctgcctcgccg

SEQ ID NO: 46551 - DNA, 20 bp, Artificial Sequence
  chemically synthesized
gtttctgcctcgccgcggca

SEQ ID NO: 46552 - DNA, 20 bp, Artificial Sequence
  chemically synthesized
tttctgcctcgccgcggcac

SEQ ID NO: 46553 - DNA, 20 bp, Artificial Sequence
  chemically synthesized
ctgcctcgccgcggcacagg

SEQ ID NO: 46554 - DNA, 20 bp, Artificial Sequence
  chemically synthesized
tgcctcgccgcggcacaggt

SEQ ID NO: 46555 - DNA, 20 bp, Artificial Sequence
  chemically synthesized
cgccgcggcacaggtgggtg

SEQ ID NO: 46556 - DNA, 20 bp, Artificial Sequence
  chemically synthesized
gccgcggcacaggtgggtga

SEQ ID NO: 46557 - DNA, 20 bp, Artificial Sequence
  chemically synthesized
cgcggcacaggtgggtgaag

SEQ ID NO: 46558 - DNA, 20 bp, Artificial Sequence
  chemically synthesized
tgggtgaaggagtgaatgcc

SEQ ID NO: 46559 - DNA, 20 bp, Artificial Sequence
  chemically synthesized
agtgaatgcctggaacgtac

SEQ ID NO: 46560 - DNA, 20 bp, Artificial Sequence
  chemically synthesized
gtgaatgcctggaacgtact

SEQ ID NO: 46561 - DNA, 20 bp, Artificial Sequence
  chemically synthesized
gaacgtactgggaactgcac

SEQ ID NO: 46562 - DNA, 20 bp, Artificial Sequence
  chemically synthesized
aacgtactgggaactgcacc

SEQ ID NO: 46563 - DNA, 20 bp, Artificial Sequence
  chemically synthesized
actgggaactgcaccaggca

SEQ ID NO: 46564 - DNA, 20 bp, Artificial Sequence
  chemically synthesized
tgggaactgcaccaggcaca

SEQ ID NO: 46565 - DNA, 20 bp, Artificial Sequence
  chemically synthesized
aactgcaccaggcacagaga

SEQ ID NO: 46566 - DNA, 20 bp, Artificial Sequence
  chemically synthesized
tgcaccaggcacagagaaag

SEQ ID NO: 46567 - DNA, 20 bp, Artificial Sequence
  chemically synthesized
gcaccaggcacagagaaagc

SEQ ID NO: 46568 - DNA, 20 bp, Artificial Sequence
  chemically synthesized
agaaagcgggcttgccatta

SEQ ID NO: 46569 - DNA, 20 bp, Artificial Sequence
  chemically synthesized
aagcgggcttgccattatag

SEQ ID NO: 46570 - DNA, 20 bp, Artificial Sequence
  chemically synthesized
agcgggcttgccattatagt

SEQ ID NO: 46571 - DNA, 20 bp, Artificial Sequence
  chemically synthesized
cattatagtgggttccgatt

SEQ ID NO: 46572 - DNA, 20 bp, Artificial Sequence
  chemically synthesized
tagtgggttccgatttggtt

SEQ ID NO: 46573 - DNA, 20 bp, Artificial Sequence
  chemically synthesized
ccgatttggtttggaaaaca

SEQ ID NO: 46574 - DNA, 20 bp, Artificial Sequence
  chemically synthesized
cgatttggtttggaaaacat

SEQ ID NO: 46575 - DNA, 20 bp, Artificial Sequence
  chemically synthesized
tttggtttggaaaacatggg

SEQ ID NO: 46576 - DNA, 20 bp, Artificial Sequence
  chemically synthesized
ggtttggaaaacatgggcag

SEQ ID NO: 46577 - DNA, 20 bp, Artificial Sequence
  chemically synthesized
tttggaaaacatgggcagcg

SEQ ID NO: 46578 - DNA, 20 bp, Artificial Sequence
  chemically synthesized
ttggaaaacatgggcagcgg

SEQ ID NO: 46579 - DNA, 20 bp, Artificial Sequence
  chemically synthesized
tggaaaacatgggcagcgga

SEQ ID NO: 46580 - DNA, 20 bp, Artificial Sequence
  chemically synthesized
aaaacatgggcagcggaggg

SEQ ID NO: 46581 - DNA, 20 bp, Artificial Sequence
  chemically synthesized
aacatgggcagcggagggtg

SEQ ID NO: 46582 - DNA, 20 bp, Artificial Sequence
  chemically synthesized
acatgggcagcggagggtgg

SEQ ID NO: 46583 - DNA, 20 bp, Artificial Sequence
  chemically synthesized
catgggcagcggagggtgga

SEQ ID NO: 46584 - DNA, 20 bp, Artificial Sequence
  chemically synthesized
gcagcggagggtggagggcc

SEQ ID NO: 46585 - DNA, 20 bp, Artificial Sequence
  chemically synthesized
agcggagggtggagggcctg

SEQ ID NO: 46586 - DNA, 20 bp, Artificial Sequence
  chemically synthesized
cggagggtggagggcctgga

SEQ ID NO: 46587 - DNA, 20 bp, Artificial Sequence
  chemically synthesized
agggtggagggcctggagag

SEQ ID NO: 46588 - DNA, 20 bp, Artificial Sequence
  chemically synthesized
gggtggagggcctggagaga

SEQ ID NO: 46589 - DNA, 20 bp, Artificial Sequence
  chemically synthesized
ctggagagaaggccctaccc

SEQ ID NO: 46590 - DNA, 20 bp, Artificial Sequence
  chemically synthesized
agagaaggccctacccgaga

SEQ ID NO: 46591 - DNA, 20 bp, Artificial Sequence
  chemically synthesized
gagaaggccctacccgagac

SEQ ID NO: 46592 - DNA, 20 bp, Artificial Sequence
  chemically synthesized
agaaggccctacccgagaca

SEQ ID NO: 46593 - DNA, 20 bp, Artificial Sequence
  chemically synthesized
gaaggccctacccgagacag

SEQ ID NO: 46594 - DNA, 20 bp, Artificial Sequence
  chemically synthesized
ggccctacccgagacagggg

SEQ ID NO: 46595 - DNA, 20 bp, Artificial Sequence
  chemically synthesized
gccctacccgagacaggggc

SEQ ID NO: 46596 - DNA, 20 bp, Artificial Sequence
  chemically synthesized
ccctacccgagacaggggcg

SEQ ID NO: 46597 - DNA, 20 bp, Artificial Sequence
  chemically synthesized
tacccgagacaggggcgggg

SEQ ID NO: 46598 - DNA, 20 bp, Artificial Sequence
  chemically synthesized
acccgagacaggggcggggt

SEQ ID NO: 46599 - DNA, 20 bp, Artificial Sequence
  chemically synthesized
cgagacaggggcggggtggg

SEQ ID NO: 46600 - DNA, 20 bp, Artificial Sequence
  chemically synthesized
gagacaggggcggggtggga

SEQ ID NO: 46601 - DNA, 20 bp, Artificial Sequence
  chemically synthesized
caggggcggggtgggaagga

SEQ ID NO: 46602 - DNA, 20 bp, Artificial Sequence
  chemically synthesized
gggcggggtgggaaggacgg

SEQ ID NO: 46603 - DNA, 20 bp, Artificial Sequence
  chemically synthesized
gtgggaaggacggcagatgc

SEQ ID NO: 46604 - DNA, 20 bp, Artificial Sequence
  chemically synthesized
tgggaaggacggcagatgct

SEQ ID NO: 46605 - DNA, 20 bp, Artificial Sequence
  chemically synthesized
ggaaggacggcagatgctgg

SEQ ID NO: 46606 - DNA, 20 bp, Artificial Sequence
  chemically synthesized
acggcagatgctgggagcac

SEQ ID NO: 46607 - DNA, 20 bp, Artificial Sequence
  chemically synthesized
cggcagatgctgggagcacg

SEQ ID NO: 46608 - DNA, 20 bp, Artificial Sequence
  chemically synthesized
gaggcaatttctttatgaca

SEQ ID NO: 46609 - DNA, 20 bp, Artificial Sequence
  chemically synthesized
atgacacagaactcatgctc

SEQ ID NO: 46610 - DNA, 20 bp, Artificial Sequence
  chemically synthesized
ctctagtattccatctgttt

SEQ ID NO: 46611 - DNA, 20 bp, Artificial Sequence
  chemically synthesized
tattccatctgtttcagccg

SEQ ID NO: 46612 - DNA, 20 bp, Artificial Sequence
  chemically synthesized
catctgtttcagccgaagaa

SEQ ID NO: 46613 - DNA, 20 bp, Artificial Sequence
  chemically synthesized
tttcagccgaagaaaagaac

SEQ ID NO: 46614 - DNA, 20 bp, Artificial Sequence
  chemically synthesized
ccgaagaaaagaaccagctg

SEQ ID NO: 46615 - DNA, 20 bp, Artificial Sequence
  chemically synthesized
cgaagaaaagaaccagctga

SEQ ID NO: 46616 - DNA, 20 bp, Artificial Sequence
  chemically synthesized
gaagaaaagaaccagctgaa

SEQ ID NO: 46617 - DNA, 20 bp, Artificial Sequence
  chemically synthesized
aagaaaagaaccagctgaag

SEQ ID NO: 46618 - DNA, 20 bp, Artificial Sequence
  chemically synthesized
aaaagaaccagctgaagggg

SEQ ID NO: 46619 - DNA, 20 bp, Artificial Sequence
  chemically synthesized
aaagaaccagctgaaggggc

SEQ ID NO: 46620 - DNA, 20 bp, Artificial Sequence
  chemically synthesized
aagaaccagctgaaggggca

SEQ ID NO: 46621 - DNA, 20 bp, Artificial Sequence
  chemically synthesized
agaaccagctgaaggggcag

SEQ ID NO: 46622 - DNA, 20 bp, Artificial Sequence
  chemically synthesized
aaccagctgaaggggcaggg

SEQ ID NO: 46623 - DNA, 20 bp, Artificial Sequence
  chemically synthesized
cagctgaaggggcaggggag

SEQ ID NO: 46624 - DNA, 20 bp, Artificial Sequence
  chemically synthesized
agctgaaggggcaggggaga

SEQ ID NO: 46625 - DNA, 20 bp, Artificial Sequence
  chemically synthesized
gctgaaggggcaggggagaa

SEQ ID NO: 46626 - DNA, 20 bp, Artificial Sequence
  chemically synthesized
ctgaaggggcaggggagaag

SEQ ID NO: 46627 - DNA, 20 bp, Artificial Sequence
  chemically synthesized
aaggggcaggggagaagggg

SEQ ID NO: 46628 - DNA, 20 bp, Artificial Sequence
  chemically synthesized
ggggcaggggagaaggggcg

SEQ ID NO: 46629 - DNA, 20 bp, Artificial Sequence
  chemically synthesized
gggcaggggagaaggggcgg

SEQ ID NO: 46630 - DNA, 20 bp, Artificial Sequence
  chemically synthesized
gaaggggcggaggtattctc

SEQ ID NO: 46631 - DNA, 20 bp, Artificial Sequence
  chemically synthesized
aaggggcggaggtattctcg

SEQ ID NO: 46632 - DNA, 20 bp, Artificial Sequence
  chemically synthesized
gaggtattctcgaggcccat

SEQ ID NO: 46633 - DNA, 20 bp, Artificial Sequence
  chemically synthesized
cgaggcccattggcgtcctt

SEQ ID NO: 46634 - DNA, 20 bp, Artificial Sequence
  chemically synthesized
gaggcccattggcgtccttt

SEQ ID NO: 46635 - DNA, 20 bp, Artificial Sequence
  chemically synthesized
cattggcgtcctttaggact

SEQ ID NO: 46636 - DNA, 20 bp, Artificial Sequence
  chemically synthesized
attggcgtcctttaggactc

SEQ ID NO: 46637 - DNA, 20 bp, Artificial Sequence
  chemically synthesized
ggcgtcctttaggactcagg

SEQ ID NO: 46638 - DNA, 20 bp, Artificial Sequence
  chemically synthesized
gcgtcctttaggactcaggc

SEQ ID NO: 46639 - DNA, 20 bp, Artificial Sequence
  chemically synthesized
cgtcctttaggactcaggca

SEQ ID NO: 46640 - DNA, 20 bp, Artificial Sequence
  chemically synthesized
cctttaggactcaggcaggg

SEQ ID NO: 46641 - DNA, 20 bp, Artificial Sequence
  chemically synthesized
ctttaggactcaggcaggga

SEQ ID NO: 46642 - DNA, 20 bp, Artificial Sequence
  chemically synthesized
tttaggactcaggcagggaa

SEQ ID NO: 46643 - DNA, 20 bp, Artificial Sequence
  chemically synthesized
ctcaggcagggaagggccct

SEQ ID NO: 46644 - DNA, 20 bp, Artificial Sequence
  chemically synthesized
gggaagggcccttggtgctc

SEQ ID NO: 46645 - DNA, 20 bp, Artificial Sequence
  chemically synthesized
gaagggcccttggtgctctg

SEQ ID NO: 46646 - DNA, 20 bp, Artificial Sequence
  chemically synthesized
ggcccttggtgctctggagc

SEQ ID NO: 46647 - DNA, 20 bp, Artificial Sequence
  chemically synthesized
cccttggtgctctggagccg

SEQ ID NO: 46648 - DNA, 20 bp, Artificial Sequence
  chemically synthesized
ccttggtgctctggagccgg

SEQ ID NO: 46649 - DNA, 20 bp, Artificial Sequence
  chemically synthesized
tggtgctctggagccggagg

SEQ ID NO: 46650 - DNA, 20 bp, Artificial Sequence
  chemically synthesized
ggagccggaggtggtgcgcc

SEQ ID NO: 46651 - DNA, 20 bp, Artificial Sequence
  chemically synthesized
ggaggtggtgcgcctggtac

SEQ ID NO: 46652 - DNA, 20 bp, Artificial Sequence
  chemically synthesized
gaggtggtgcgcctggtact

SEQ ID NO: 46653 - DNA, 20 bp, Artificial Sequence
  chemically synthesized
tgcgcctggtactgggaccc

SEQ ID NO: 46654 - DNA, 20 bp, Artificial Sequence
  chemically synthesized
cgcctggtactgggaccccg

SEQ ID NO: 46655 - DNA, 20 bp, Artificial Sequence
  chemically synthesized
ggtactgggaccccggagct

SEQ ID NO: 46656 - DNA, 20 bp, Artificial Sequence
  chemically synthesized
tgggaccccggagctgagcc

SEQ ID NO: 46657 - DNA, 20 bp, Artificial Sequence
  chemically synthesized
cggagctgagcccggcgcct

SEQ ID NO: 46658 - DNA, 20 bp, Artificial Sequence
  chemically synthesized
gcccggcgcctcagcccacc

SEQ ID NO: 46659 - DNA, 20 bp, Artificial Sequence
  chemically synthesized
ggctgtctgccgaccgtgtg

SEQ ID NO: 46660 - DNA, 20 bp, Artificial Sequence
  chemically synthesized
gctgtctgccgaccgtgtgc

SEQ ID NO: 46661 - DNA, 20 bp, Artificial Sequence
  chemically synthesized
ctgtctgccgaccgtgtgcg

SEQ ID NO: 46662 - DNA, 20 bp, Artificial Sequence
  chemically synthesized
ctgccgaccgtgtgcggggc

SEQ ID NO: 46663 - DNA, 20 bp, Artificial Sequence
  chemically synthesized
agtttgctcaacaactctgc

SEQ ID NO: 46664 - DNA, 20 bp, Artificial Sequence
  chemically synthesized
tcaacaactctgccagcttc

SEQ ID NO: 46665 - DNA, 20 bp, Artificial Sequence
  chemically synthesized
ctctgccagcttctggccct

SEQ ID NO: 46666 - DNA, 20 bp, Artificial Sequence
  chemically synthesized
tctgccagcttctggccctc

SEQ ID NO: 46667 - DNA, 20 bp, Artificial Sequence
  chemically synthesized
agcttctggccctcaggctg

SEQ ID NO: 46668 - DNA, 20 bp, Artificial Sequence
  chemically synthesized
gcttctggccctcaggctgt

SEQ ID NO: 46669 - DNA, 20 bp, Artificial Sequence
  chemically synthesized
tctggccctcaggctgtggg

SEQ ID NO: 46670 - DNA, 20 bp, Artificial Sequence
  chemically synthesized
ggctgtgggaagcttcttcc

SEQ ID NO: 46671 - DNA, 20 bp, Artificial Sequence
  chemically synthesized
gctgtgggaagcttcttccc

SEQ ID NO: 46672 - DNA, 20 bp, Artificial Sequence
  chemically synthesized
ctgtgggaagcttcttcccg

SEQ ID NO: 46673 - DNA, 20 bp, Artificial Sequence
  chemically synthesized
gggaagcttcttcccggggc

SEQ ID NO: 46674 - DNA, 20 bp, Artificial Sequence
  chemically synthesized
tcttcccggggcgagaccac

SEQ ID NO: 46675 - DNA, 20 bp, Artificial Sequence
  chemically synthesized
cgagaccactagctttttct

SEQ ID NO: 46676 - DNA, 20 bp, Artificial Sequence
  chemically synthesized
tagctttttctaagtattac

SEQ ID NO: 46677 - DNA, 20 bp, Artificial Sequence
  chemically synthesized
ttttctaagtattaccagcc

SEQ ID NO: 46678 - DNA, 20 bp, Artificial Sequence
  chemically synthesized
tttctaagtattaccagccc

SEQ ID NO: 46679 - DNA, 20 bp, Artificial Sequence
  chemically synthesized
agtattaccagcccaggact

SEQ ID NO: 46680 - DNA, 20 bp, Artificial Sequence
  chemically synthesized
taccagcccaggacttggct

SEQ ID NO: 46681 - DNA, 20 bp, Artificial Sequence
  chemically synthesized
accagcccaggacttggctg

SEQ ID NO: 46682 - DNA, 20 bp, Artificial Sequence
  chemically synthesized
ggctgaggttctgtgtcccc

SEQ ID NO: 46683 - DNA, 20 bp, Artificial Sequence
  chemically synthesized
aggttctgtgtcccccagct

SEQ ID NO: 46684 - DNA, 20 bp, Artificial Sequence
  chemically synthesized
gttctgtgtcccccagcttg

SEQ ID NO: 46685 - DNA, 20 bp, Artificial Sequence
  chemically synthesized
tgtgtcccccagcttggagt

SEQ ID NO: 46686 - DNA, 20 bp, Artificial Sequence
  chemically synthesized
ccccagcttggagtcagatg

SEQ ID NO: 46687 - DNA, 20 bp, Artificial Sequence
  chemically synthesized
cccagcttggagtcagatgt

SEQ ID NO: 46688 - DNA, 20 bp, Artificial Sequence
  chemically synthesized
ccagcttggagtcagatgtg

SEQ ID NO: 46689 - DNA, 20 bp, Artificial Sequence
  chemically synthesized
tcagatgtggggttgaatct

SEQ ID NO: 46690 - DNA, 20 bp, Artificial Sequence
  chemically synthesized
gaatcttggcttcctctcac

SEQ ID NO: 46691 - DNA, 20 bp, Artificial Sequence
  chemically synthesized
tggcttcctctcactagctg

SEQ ID NO: 46692 - DNA, 20 bp, Artificial Sequence
  chemically synthesized
cactagctgtggtgcttgac

SEQ ID NO: 46693 - DNA, 20 bp, Artificial Sequence
  chemically synthesized
ttgacaagtcacttatcctt

SEQ ID NO: 46694 - DNA, 20 bp, Artificial Sequence
  chemically synthesized
ctccattgcctaatctttaa

SEQ ID NO: 46695 - DNA, 20 bp, Artificial Sequence
  chemically synthesized
tccattgcctaatctttaaa

SEQ ID NO: 46696 - DNA, 20 bp, Artificial Sequence
  chemically synthesized
ccattgcctaatctttaaaa

SEQ ID NO: 46697 - DNA, 20 bp, Artificial Sequence
  chemically synthesized
attgcctaatctttaaaagg

SEQ ID NO: 46698 - DNA, 20 bp, Artificial Sequence
  chemically synthesized
ttgcctaatctttaaaaggg

SEQ ID NO: 46699 - DNA, 20 bp, Artificial Sequence
  chemically synthesized
ggaggtgacaatcgtcccta

SEQ ID NO: 46700 - DNA, 20 bp, Artificial Sequence
  chemically synthesized
tgacaatcgtccctacggct

SEQ ID NO: 46701 - DNA, 20 bp, Artificial Sequence
  chemically synthesized
caatcgtccctacggctcag

SEQ ID NO: 46702 - DNA, 20 bp, Artificial Sequence
  chemically synthesized
tcgtccctacggctcagtgg

SEQ ID NO: 46703 - DNA, 20 bp, Artificial Sequence
  chemically synthesized
tccctacggctcagtggcag

SEQ ID NO: 46704 - DNA, 20 bp, Artificial Sequence
  chemically synthesized
tacggctcagtggcagcaga

SEQ ID NO: 46705 - DNA, 20 bp, Artificial Sequence
  chemically synthesized
acggctcagtggcagcagat

SEQ ID NO: 46706 - DNA, 20 bp, Artificial Sequence
  chemically synthesized
cggctcagtggcagcagatg

SEQ ID NO: 46707 - DNA, 20 bp, Artificial Sequence
  chemically synthesized
gctcagtggcagcagatggg

SEQ ID NO: 46708 - DNA, 20 bp, Artificial Sequence
  chemically synthesized
tggcagcagatggggagatg

SEQ ID NO: 46709 - DNA, 20 bp, Artificial Sequence
  chemically synthesized
ggcagcagatggggagatga

SEQ ID NO: 46710 - DNA, 20 bp, Artificial Sequence
  chemically synthesized
gcagcagatggggagatgaa

SEQ ID NO: 46711 - DNA, 20 bp, Artificial Sequence
  chemically synthesized
cagatggggagatgaaggga

SEQ ID NO: 46712 - DNA, 20 bp, Artificial Sequence
  chemically synthesized
gggaaagttctgttgaccat

SEQ ID NO: 46713 - DNA, 20 bp, Artificial Sequence
  chemically synthesized
catgagtgaacttacaatgc

SEQ ID NO: 46714 - DNA, 20 bp, Artificial Sequence
  chemically synthesized
tgaacttacaatgcaagccc

SEQ ID NO: 46715 - DNA, 20 bp, Artificial Sequence
  chemically synthesized
gaacttacaatgcaagcccc

SEQ ID NO: 46716 - DNA, 20 bp, Artificial Sequence
  chemically synthesized
aacttacaatgcaagccccg

SEQ ID NO: 46717 - DNA, 20 bp, Artificial Sequence
  chemically synthesized
acttacaatgcaagccccgg

SEQ ID NO: 46718 - DNA, 20 bp, Artificial Sequence
  chemically synthesized
cttacaatgcaagccccggg

SEQ ID NO: 46719 - DNA, 20 bp, Artificial Sequence
  chemically synthesized
agccccggggggatcacttg

SEQ ID NO: 46720 - DNA, 20 bp, Artificial Sequence
  chemically synthesized
tgcagttttgtccctgtctg

SEQ ID NO: 46721 - DNA, 20 bp, Artificial Sequence
  chemically synthesized
ctgtctgcagtgtgacctgt

SEQ ID NO: 46722 - DNA, 20 bp, Artificial Sequence
  chemically synthesized
attgtctttgctccaaacca

SEQ ID NO: 46723 - DNA, 20 bp, Artificial Sequence
  chemically synthesized
ttgctccaaaccacagctcc

SEQ ID NO: 46724 - DNA, 20 bp, Artificial Sequence
  chemically synthesized
tgctccaaaccacagctcct

SEQ ID NO: 46725 - DNA, 20 bp, Artificial Sequence
  chemically synthesized
gctccaaaccacagctcctg

SEQ ID NO: 46726 - DNA, 20 bp, Artificial Sequence
  chemically synthesized
ccaaaccacagctcctgggg

SEQ ID NO: 46727 - DNA, 20 bp, Artificial Sequence
  chemically synthesized
aaaccacagctcctggggca

SEQ ID NO: 46728 - DNA, 20 bp, Artificial Sequence
  chemically synthesized
aaccacagctcctggggcag

SEQ ID NO: 46729 - DNA, 20 bp, Artificial Sequence
  chemically synthesized
accacagctcctggggcaga

SEQ ID NO: 46730 - DNA, 20 bp, Artificial Sequence
  chemically synthesized
ccacagctcctggggcagag

SEQ ID NO: 46731 - DNA, 20 bp, Artificial Sequence
  chemically synthesized
ggggaaaattctgccactca

SEQ ID NO: 46732 - DNA, 20 bp, Artificial Sequence
  chemically synthesized
gcctgcccacgcttctgtct

SEQ ID NO: 46733 - DNA, 20 bp, Artificial Sequence
  chemically synthesized
acgcttctgtctgagtgtgc

SEQ ID NO: 46734 - DNA, 20 bp, Artificial Sequence
  chemically synthesized
cgcttctgtctgagtgtgct

SEQ ID NO: 46735 - DNA, 20 bp, Artificial Sequence
  chemically synthesized
ttctgtctgagtgtgctggg

SEQ ID NO: 46736 - DNA, 20 bp, Artificial Sequence
  chemically synthesized
tgtctgagtgtgctgggtgg

SEQ ID NO: 46737 - DNA, 20 bp, Artificial Sequence
  chemically synthesized
gtctgagtgtgctgggtggc

SEQ ID NO: 46738 - DNA, 20 bp, Artificial Sequence
  chemically synthesized
gagtgtgctgggtggcagga

SEQ ID NO: 46739 - DNA, 20 bp, Artificial Sequence
  chemically synthesized
gtgctgggtggcaggatggc

SEQ ID NO: 46740 - DNA, 20 bp, Artificial Sequence
  chemically synthesized
caggatggcaagtccttact

SEQ ID NO: 46741 - DNA, 20 bp, Artificial Sequence
  chemically synthesized
tggcaagtccttactcagct

SEQ ID NO: 46742 - DNA, 20 bp, Artificial Sequence
  chemically synthesized
agtccttactcagctcagta

SEQ ID NO: 46743 - DNA, 20 bp, Artificial Sequence
  chemically synthesized
agccctcttccttgttccct

SEQ ID NO: 46744 - DNA, 20 bp, Artificial Sequence
  chemically synthesized
cctgagcctttgactttctc

SEQ ID NO: 46745 - DNA, 20 bp, Artificial Sequence
  chemically synthesized
ctgagcctttgactttctcg

SEQ ID NO: 46746 - DNA, 20 bp, Artificial Sequence
  chemically synthesized
tgagcctttgactttctcga

SEQ ID NO: 46747 - DNA, 20 bp, Artificial Sequence
  chemically synthesized
gactttctcgagggatgttg

SEQ ID NO: 46748 - DNA, 20 bp, Artificial Sequence
  chemically synthesized
actttctcgagggatgttgt

SEQ ID NO: 46749 - DNA, 20 bp, Artificial Sequence
  chemically synthesized
ctttctcgagggatgttgtg

SEQ ID NO: 46750 - DNA, 20 bp, Artificial Sequence
  chemically synthesized
cgagggatgttgtggggttg

SEQ ID NO: 46751 - DNA, 20 bp, Artificial Sequence
  chemically synthesized
ggatgttgtggggttgtggc

SEQ ID NO: 46752 - DNA, 20 bp, Artificial Sequence
  chemically synthesized
gatgttgtggggttgtggcc

SEQ ID NO: 46753 - DNA, 20 bp, Artificial Sequence
  chemically synthesized
tgtggggttgtggccaggat

SEQ ID NO: 46754 - DNA, 20 bp, Artificial Sequence
  chemically synthesized
gggttgtggccaggataaga

SEQ ID NO: 46755 - DNA, 20 bp, Artificial Sequence
  chemically synthesized
ggttgtggccaggataagaa

SEQ ID NO: 46756 - DNA, 20 bp, Artificial Sequence
  chemically synthesized
gttgtggccaggataagaaa

SEQ ID NO: 46757 - DNA, 20 bp, Artificial Sequence
  chemically synthesized
aggataagaaagggcatttc

SEQ ID NO: 46758 - DNA, 20 bp, Artificial Sequence
  chemically synthesized
ctgctccaaaacaactgttc

SEQ ID NO: 46759 - DNA, 20 bp, Artificial Sequence
  chemically synthesized
caaaacaactgttctggaaa

SEQ ID NO: 46760 - DNA, 20 bp, Artificial Sequence
  chemically synthesized
acaactgttctggaaatagt

SEQ ID NO: 46761 - DNA, 20 bp, Artificial Sequence
  chemically synthesized
aatagtgagtaccccatcct

SEQ ID NO: 46762 - DNA, 20 bp, Artificial Sequence
  chemically synthesized
tagtgagtaccccatcctga

SEQ ID NO: 46763 - DNA, 20 bp, Artificial Sequence
  chemically synthesized
agtgagtaccccatcctgag

SEQ ID NO: 46764 - DNA, 20 bp, Artificial Sequence
  chemically synthesized
agtaccccatcctgagaggt

SEQ ID NO: 46765 - DNA, 20 bp, Artificial Sequence
  chemically synthesized
ccccatcctgagaggtgagt

SEQ ID NO: 46766 - DNA, 20 bp, Artificial Sequence
  chemically synthesized
catcctgagaggtgagtaag

SEQ ID NO: 46767 - DNA, 20 bp, Artificial Sequence
  chemically synthesized
tcctgagaggtgagtaagca

SEQ ID NO: 46768 - DNA, 20 bp, Artificial Sequence
  chemically synthesized
cctgagaggtgagtaagcag

SEQ ID NO: 46769 - DNA, 20 bp, Artificial Sequence
  chemically synthesized
gctgtatgaccacctgaacc

SEQ ID NO: 46770 - DNA, 20 bp, Artificial Sequence
  chemically synthesized
accacctgaaccaagccctt

SEQ ID NO: 46771 - DNA, 20 bp, Artificial Sequence
  chemically synthesized
ccacctgaaccaagcccttg

SEQ ID NO: 46772 - DNA, 20 bp, Artificial Sequence
  chemically synthesized
ccttgaggatgtttcttctc

SEQ ID NO: 46773 - DNA, 20 bp, Artificial Sequence
  chemically synthesized
tgaggatgtttcttctctgg

SEQ ID NO: 46774 - DNA, 20 bp, Artificial Sequence
  chemically synthesized
ggatgtttcttctctggtgg

SEQ ID NO: 46775 - DNA, 20 bp, Artificial Sequence
  chemically synthesized
tttcttctctggtggaagtt

SEQ ID NO: 46776 - DNA, 20 bp, Artificial Sequence
  chemically synthesized
tctctggtggaagtttggaa

SEQ ID NO: 46777 - DNA, 20 bp, Artificial Sequence
  chemically synthesized
ctctggtggaagtttggaac

SEQ ID NO: 46778 - DNA, 20 bp, Artificial Sequence
  chemically synthesized
ctggtggaagtttggaacag

SEQ ID NO: 46779 - DNA, 20 bp, Artificial Sequence
  chemically synthesized
tttggaacaggagcctcctc

SEQ ID NO: 46780 - DNA, 20 bp, Artificial Sequence
  chemically synthesized
tcatttattcattcattcaa

SEQ ID NO: 46781 - DNA, 20 bp, Artificial Sequence
  chemically synthesized
ttcattcaatggttattttg

SEQ ID NO: 46782 - DNA, 20 bp, Artificial Sequence
  chemically synthesized
tcattcaatggttattttgt

SEQ ID NO: 46783 - DNA, 20 bp, Artificial Sequence
  chemically synthesized
tattttgtgggaatcgaatt

SEQ ID NO: 46784 - DNA, 20 bp, Artificial Sequence
  chemically synthesized
tttagaatgaaaatattttt

SEQ ID NO: 46785 - DNA, 20 bp, Artificial Sequence
  chemically synthesized
gaatgaaaatattttttggc

SEQ ID NO: 46786 - DNA, 20 bp, Artificial Sequence
  chemically synthesized
tgaaaatattttttggcaag

SEQ ID NO: 46787 - DNA, 20 bp, Artificial Sequence
  chemically synthesized
ggcaagcagaaaataatttt

SEQ ID NO: 46788 - DNA, 20 bp, Artificial Sequence
  chemically synthesized
ttagaccaatccttttcttt

SEQ ID NO: 46789 - DNA, 20 bp, Artificial Sequence
  chemically synthesized
aatccttttcttttagtcat

SEQ ID NO: 46790 - DNA, 20 bp, Artificial Sequence
  chemically synthesized
tcttttagtcatgagaaact

SEQ ID NO: 46791 - DNA, 20 bp, Artificial Sequence
  chemically synthesized
cttttagtcatgagaaactg

SEQ ID NO: 46792 - DNA, 20 bp, Artificial Sequence
  chemically synthesized
agtcatgagaaactgaggcc

SEQ ID NO: 46793 - DNA, 20 bp, Artificial Sequence
  chemically synthesized
tcatgagaaactgaggccca

SEQ ID NO: 46794 - DNA, 20 bp, Artificial Sequence
  chemically synthesized
atgagaaactgaggcccaga

SEQ ID NO: 46795 - DNA, 20 bp, Artificial Sequence
  chemically synthesized
gagaaactgaggcccagaga

SEQ ID NO: 46796 - DNA, 20 bp, Artificial Sequence
  chemically synthesized
agaaactgaggcccagagag

SEQ ID NO: 46797 - DNA, 20 bp, Artificial Sequence
  chemically synthesized
aaactgaggcccagagagag

SEQ ID NO: 46798 - DNA, 20 bp, Artificial Sequence
  chemically synthesized
aactgaggcccagagagagg

SEQ ID NO: 46799 - DNA, 20 bp, Artificial Sequence
  chemically synthesized
ccagagagaggaggtcaccc

SEQ ID NO: 46800 - DNA, 20 bp, Artificial Sequence
  chemically synthesized
cagagagaggaggtcacccc

SEQ ID NO: 46801 - DNA, 20 bp, Artificial Sequence
  chemically synthesized
ggaggtcaccccaggtgcat

SEQ ID NO: 46802 - DNA, 20 bp, Artificial Sequence
  chemically synthesized
caccccaggtgcattagaac

SEQ ID NO: 46803 - DNA, 20 bp, Artificial Sequence
  chemically synthesized
accccaggtgcattagaact

SEQ ID NO: 46804 - DNA, 20 bp, Artificial Sequence
  chemically synthesized
gtgcattagaactgggtttc

SEQ ID NO: 46805 - DNA, 20 bp, Artificial Sequence
  chemically synthesized
agaactgacactccactgca

SEQ ID NO: 46806 - DNA, 20 bp, Artificial Sequence
  chemically synthesized
aactgacactccactgcaca

SEQ ID NO: 46807 - DNA, 20 bp, Artificial Sequence
  chemically synthesized
caattcattcaatttttatt

SEQ ID NO: 46808 - DNA, 20 bp, Artificial Sequence
  chemically synthesized
ttcattcaatttttatttag

SEQ ID NO: 46809 - DNA, 20 bp, Artificial Sequence
  chemically synthesized
attcaatttttatttagcgg

SEQ ID NO: 46810 - DNA, 20 bp, Artificial Sequence
  chemically synthesized
ttcaatttttatttagcgga

SEQ ID NO: 46811 - DNA, 20 bp, Artificial Sequence
  chemically synthesized
tatttagcggaaggcatttt

SEQ ID NO: 46812 - DNA, 20 bp, Artificial Sequence
  chemically synthesized
tagcggaaggcattttcaga

SEQ ID NO: 46813 - DNA, 20 bp, Artificial Sequence
  chemically synthesized
agcggaaggcattttcagat

SEQ ID NO: 46814 - DNA, 20 bp, Artificial Sequence
  chemically synthesized
cattttcagatgggtctttg

SEQ ID NO: 46815 - DNA, 20 bp, Artificial Sequence
  chemically synthesized
cagatgggtctttgaagcat

SEQ ID NO: 46816 - DNA, 20 bp, Artificial Sequence
  chemically synthesized
atgggtctttgaagcattag

SEQ ID NO: 46817 - DNA, 20 bp, Artificial Sequence
  chemically synthesized
tgggtctttgaagcattagt

SEQ ID NO: 46818 - DNA, 20 bp, Artificial Sequence
  chemically synthesized
ggtctttgaagcattagtag

SEQ ID NO: 46819 - DNA, 20 bp, Artificial Sequence
  chemically synthesized
ttgaagcattagtaggagtt

SEQ ID NO: 46820 - DNA, 20 bp, Artificial Sequence
  chemically synthesized
tagtaggagttcagcgatga

SEQ ID NO: 46821 - DNA, 20 bp, Artificial Sequence
  chemically synthesized
ttcagcgatgatggtgtcat

SEQ ID NO: 46822 - DNA, 20 bp, Artificial Sequence
  chemically synthesized
gtgtcatgagaattttattc

SEQ ID NO: 46823 - DNA, 20 bp, Artificial Sequence
  chemically synthesized
tgtcatgagaattttattct

SEQ ID NO: 46824 - DNA, 20 bp, Artificial Sequence
  chemically synthesized
tgagaattttattctaggat

SEQ ID NO: 46825 - DNA, 20 bp, Artificial Sequence
  chemically synthesized
gagaattttattctaggatt

SEQ ID NO: 46826 - DNA, 20 bp, Artificial Sequence
  chemically synthesized
gaattttattctaggattag

SEQ ID NO: 46827 - DNA, 20 bp, Artificial Sequence
  chemically synthesized
aattttattctaggattagg

SEQ ID NO: 46828 - DNA, 20 bp, Artificial Sequence
  chemically synthesized
attaggaggtaccatgaaca

SEQ ID NO: 46829 - DNA, 20 bp, Artificial Sequence
  chemically synthesized
aggtaccatgaacaaagata

SEQ ID NO: 46830 - DNA, 20 bp, Artificial Sequence
  chemically synthesized
gtaccatgaacaaagataca

SEQ ID NO: 46831 - DNA, 20 bp, Artificial Sequence
  chemically synthesized
catgaacaaagatacagagc

SEQ ID NO: 46832 - DNA, 20 bp, Artificial Sequence
  chemically synthesized
atgaacaaagatacagagct

SEQ ID NO: 46833 - DNA, 20 bp, Artificial Sequence
  chemically synthesized
agatacagagctgggaaaac

SEQ ID NO: 46834 - DNA, 20 bp, Artificial Sequence
  chemically synthesized
atacagagctgggaaaacca

SEQ ID NO: 46835 - DNA, 20 bp, Artificial Sequence
  chemically synthesized
tacagagctgggaaaaccag

SEQ ID NO: 46836 - DNA, 20 bp, Artificial Sequence
  chemically synthesized
agagctgggaaaaccagagg

SEQ ID NO: 46837 - DNA, 20 bp, Artificial Sequence
  chemically synthesized
gctgggaaaaccagaggtgg

SEQ ID NO: 46838 - DNA, 20 bp, Artificial Sequence
  chemically synthesized
gaaaaccagaggtggaagat

SEQ ID NO: 46839 - DNA, 20 bp, Artificial Sequence
  chemically synthesized
aaaaccagaggtggaagata

SEQ ID NO: 46840 - DNA, 20 bp, Artificial Sequence
  chemically synthesized
aaccagaggtggaagataag

SEQ ID NO: 46841 - DNA, 20 bp, Artificial Sequence
  chemically synthesized
agataaggagcacatgtcca

SEQ ID NO: 46842 - DNA, 20 bp, Artificial Sequence
  chemically synthesized
gttctttttctttttttttt

SEQ ID NO: 46843 - DNA, 20 bp, Artificial Sequence
  chemically synthesized
tttttcttttttttttgaga

SEQ ID NO: 46844 - DNA, 20 bp, Artificial Sequence
  chemically synthesized
tttcttttttttttgagatg

SEQ ID NO: 46845 - DNA, 20 bp, Artificial Sequence
  chemically synthesized
ggagtttcgctcttgttgcc

SEQ ID NO: 46846 - DNA, 20 bp, Artificial Sequence
  chemically synthesized
gagtttcgctcttgttgccc

SEQ ID NO: 46847 - DNA, 20 bp, Artificial Sequence
  chemically synthesized
ttcgctcttgttgcccaggc

SEQ ID NO: 46848 - DNA, 20 bp, Artificial Sequence
  chemically synthesized
cgctcttgttgcccaggctg

SEQ ID NO: 46849 - DNA, 20 bp, Artificial Sequence
  chemically synthesized
ttgcccaggctggagtgcaa

SEQ ID NO: 46850 - DNA, 20 bp, Artificial Sequence
  chemically synthesized
caggctggagtgcaatggtg

SEQ ID NO: 46851 - DNA, 20 bp, Artificial Sequence
  chemically synthesized
ggagtgcaatggtgcagtct

SEQ ID NO: 46852 - DNA, 20 bp, Artificial Sequence
  chemically synthesized
tcactgcaacatctgtctcc

SEQ ID NO: 46853 - DNA, 20 bp, Artificial Sequence
  chemically synthesized
cactgcaacatctgtctccc

SEQ ID NO: 46854 - DNA, 20 bp, Artificial Sequence
  chemically synthesized
aacatctgtctcccgggttc

SEQ ID NO: 46855 - DNA, 20 bp, Artificial Sequence
  chemically synthesized
atctgtctcccgggttcaag

SEQ ID NO: 46856 - DNA, 20 bp, Artificial Sequence
  chemically synthesized
ttcaagtggttctcctgcct

SEQ ID NO: 46857 - DNA, 20 bp, Artificial Sequence
  chemically synthesized
ttctcctgcctcagcctccc

SEQ ID NO: 46858 - DNA, 20 bp, Artificial Sequence
  chemically synthesized
tcctgcctcagcctcccaag

SEQ ID NO: 46859 - DNA, 20 bp, Artificial Sequence
  chemically synthesized
gcctcagcctcccaagaagc

SEQ ID NO: 46860 - DNA, 20 bp, Artificial Sequence
  chemically synthesized
cctcagcctcccaagaagct

SEQ ID NO: 46861 - DNA, 20 bp, Artificial Sequence
  chemically synthesized
ctcccaagaagctgggatta

SEQ ID NO: 46862 - DNA, 20 bp, Artificial Sequence
  chemically synthesized
tcccaagaagctgggattac

SEQ ID NO: 46863 - DNA, 20 bp, Artificial Sequence
  chemically synthesized
caggtacctgccaccacgcc

SEQ ID NO: 46864 - DNA, 20 bp, Artificial Sequence
  chemically synthesized
ccggctaatttttgtatttt

SEQ ID NO: 46865 - DNA, 20 bp, Artificial Sequence
  chemically synthesized
gctaatttttgtatttttag

SEQ ID NO: 46866 - DNA, 20 bp, Artificial Sequence
  chemically synthesized
taatttttgtatttttagta

SEQ ID NO: 46867 - DNA, 20 bp, Artificial Sequence
  chemically synthesized
tttttgtatttttagtagag

SEQ ID NO: 46868 - DNA, 20 bp, Artificial Sequence
  chemically synthesized
ttttgtatttttagtagaga

SEQ ID NO: 46869 - DNA, 20 bp, Artificial Sequence
  chemically synthesized
tttgtatttttagtagagaa

SEQ ID NO: 46870 - DNA, 20 bp, Artificial Sequence
  chemically synthesized
ttgtatttttagtagagaag

SEQ ID NO: 46871 - DNA, 20 bp, Artificial Sequence
  chemically synthesized
gagaaggggtttcaccacgt

SEQ ID NO: 46872 - DNA, 20 bp, Artificial Sequence
  chemically synthesized
aggggtttcaccacgttggc

SEQ ID NO: 46873 - DNA, 20 bp, Artificial Sequence
  chemically synthesized
ggggtttcaccacgttggcc

SEQ ID NO: 46874 - DNA, 20 bp, Artificial Sequence
  chemically synthesized
tttcaccacgttggccaggc

SEQ ID NO: 46875 - DNA, 20 bp, Artificial Sequence
  chemically synthesized
tcgcaaactcctgacctcct

SEQ ID NO: 46876 - DNA, 20 bp, Artificial Sequence
  chemically synthesized
caaactcctgacctcctcag

SEQ ID NO: 46877 - DNA, 20 bp, Artificial Sequence
  chemically synthesized
ctgacctcctcagtggatcc

SEQ ID NO: 46878 - DNA, 20 bp, Artificial Sequence
  chemically synthesized
tgacctcctcagtggatccg

SEQ ID NO: 46879 - DNA, 20 bp, Artificial Sequence
  chemically synthesized
acctcctcagtggatccgag

SEQ ID NO: 46880 - DNA, 20 bp, Artificial Sequence
  chemically synthesized
cctcctcagtggatccgagg

SEQ ID NO: 46881 - DNA, 20 bp, Artificial Sequence
  chemically synthesized
aggaggtgatcctcccgcct

SEQ ID NO: 46882 - DNA, 20 bp, Artificial Sequence
  chemically synthesized
cctcccgcctcagcctccca

SEQ ID NO: 46883 - DNA, 20 bp, Artificial Sequence
  chemically synthesized
ctcccaaagtgctcgaatta

SEQ ID NO: 46884 - DNA, 20 bp, Artificial Sequence
  chemically synthesized
tcccaaagtgctcgaattac

SEQ ID NO: 46885 - DNA, 20 bp, Artificial Sequence
  chemically synthesized
agtgctcgaattacaggtgt

SEQ ID NO: 46886 - DNA, 20 bp, Artificial Sequence
  chemically synthesized
caggtgtgagccaccacgcc

SEQ ID NO: 46887 - DNA, 20 bp, Artificial Sequence
  chemically synthesized
gccaccacgcctggcctcca

SEQ ID NO: 46888 - DNA, 20 bp, Artificial Sequence
  chemically synthesized
taaaatgttacgaaaaccaa

SEQ ID NO: 46889 - DNA, 20 bp, Artificial Sequence
  chemically synthesized
tttttttgtgatttatttga

SEQ ID NO: 46890 - DNA, 20 bp, Artificial Sequence
  chemically synthesized
ttttgtgatttatttgatgg

SEQ ID NO: 46891 - DNA, 20 bp, Artificial Sequence
  chemically synthesized
cacctgacgtgaactgacat

SEQ ID NO: 46892 - DNA, 20 bp, Artificial Sequence
  chemically synthesized
acatgagattatttttaatt

SEQ ID NO: 46893 - DNA, 20 bp, Artificial Sequence
  chemically synthesized
tattcatatattttgctgca

SEQ ID NO: 46894 - DNA, 20 bp, Artificial Sequence
  chemically synthesized
atattttgctgcatagatta

SEQ ID NO: 46895 - DNA, 20 bp, Artificial Sequence
  chemically synthesized
gctgcatagattacagtatg

SEQ ID NO: 46896 - DNA, 20 bp, Artificial Sequence
  chemically synthesized
tagattacagtatgcagctc

SEQ ID NO: 46897 - DNA, 20 bp, Artificial Sequence
  chemically synthesized
atgcagctccagattcttcc

SEQ ID NO: 46898 - DNA, 20 bp, Artificial Sequence
  chemically synthesized
cagctccagattcttccaag

SEQ ID NO: 46899 - DNA, 20 bp, Artificial Sequence
  chemically synthesized
tgcctttctaaaatccaaac

SEQ ID NO: 46900 - DNA, 20 bp, Artificial Sequence
  chemically synthesized
ctaaaatccaaacaagttct

SEQ ID NO: 46901 - DNA, 20 bp, Artificial Sequence
  chemically synthesized
taaaatccaaacaagttctg

SEQ ID NO: 46902 - DNA, 20 bp, Artificial Sequence
  chemically synthesized
tctgaggttcaaaaccgttt

SEQ ID NO: 46903 - DNA, 20 bp, Artificial Sequence
  chemically synthesized
ttcaaaaccgttttggccct

SEQ ID NO: 46904 - DNA, 20 bp, Artificial Sequence
  chemically synthesized
tcaaaaccgttttggcccta

SEQ ID NO: 46905 - DNA, 20 bp, Artificial Sequence
  chemically synthesized
ccgttttggccctaaggctt

SEQ ID NO: 46906 - DNA, 20 bp, Artificial Sequence
  chemically synthesized
cgttttggccctaaggcttt

SEQ ID NO: 46907 - DNA, 20 bp, Artificial Sequence
  chemically synthesized
tggccctaaggctttgggta

SEQ ID NO: 46908 - DNA, 20 bp, Artificial Sequence
  chemically synthesized
ggccctaaggctttgggtaa

SEQ ID NO: 46909 - DNA, 20 bp, Artificial Sequence
  chemically synthesized
gccctaaggctttgggtaaa

SEQ ID NO: 46910 - DNA, 20 bp, Artificial Sequence
  chemically synthesized
ccctaaggctttgggtaaag

SEQ ID NO: 46911 - DNA, 20 bp, Artificial Sequence
  chemically synthesized
cctaaggctttgggtaaagg

SEQ ID NO: 46912 - DNA, 20 bp, Artificial Sequence
  chemically synthesized
aaggctttgggtaaaggggg

SEQ ID NO: 46913 - DNA, 20 bp, Artificial Sequence
  chemically synthesized
ggactctgttctactctgac

SEQ ID NO: 46914 - DNA, 20 bp, Artificial Sequence
  chemically synthesized
actctgttctactctgactg

SEQ ID NO: 46915 - DNA, 20 bp, Artificial Sequence
  chemically synthesized
ttctactctgactggagtcc

SEQ ID NO: 46916 - DNA, 20 bp, Artificial Sequence
  chemically synthesized
gagtccaagatgcatatata

SEQ ID NO: 46917 - DNA, 20 bp, Artificial Sequence
  chemically synthesized
gtccaagatgcatatataca

SEQ ID NO: 46918 - DNA, 20 bp, Artificial Sequence
  chemically synthesized
gatgcatatatacagagata

SEQ ID NO: 46919 - DNA, 20 bp, Artificial Sequence
  chemically synthesized
atgcatatatacagagatat

SEQ ID NO: 46920 - DNA, 20 bp, Artificial Sequence
  chemically synthesized
atatacagagatatgggtga

SEQ ID NO: 46921 - DNA, 20 bp, Artificial Sequence
  chemically synthesized
tatacagagatatgggtgat

SEQ ID NO: 46922 - DNA, 20 bp, Artificial Sequence
  chemically synthesized
atacagagatatgggtgatg

SEQ ID NO: 46923 - DNA, 20 bp, Artificial Sequence
  chemically synthesized
gatatgggtgatggggctgc

SEQ ID NO: 46924 - DNA, 20 bp, Artificial Sequence
  chemically synthesized
atatgggtgatggggctgca

SEQ ID NO: 46925 - DNA, 20 bp, Artificial Sequence
  chemically synthesized
tgggtgatggggctgcaagg

SEQ ID NO: 46926 - DNA, 20 bp, Artificial Sequence
  chemically synthesized
gggtgatggggctgcaaggt

SEQ ID NO: 46927 - DNA, 20 bp, Artificial Sequence
  chemically synthesized
atggggctgcaaggtaggtt

SEQ ID NO: 46928 - DNA, 20 bp, Artificial Sequence
  chemically synthesized
tggggctgcaaggtaggttg

SEQ ID NO: 46929 - DNA, 20 bp, Artificial Sequence
  chemically synthesized
ggctgcaaggtaggttgagg

SEQ ID NO: 46930 - DNA, 20 bp, Artificial Sequence
  chemically synthesized
gctgcaaggtaggttgaggt

SEQ ID NO: 46931 - DNA, 20 bp, Artificial Sequence
  chemically synthesized
ctgcaaggtaggttgaggta

SEQ ID NO: 46932 - DNA, 20 bp, Artificial Sequence
  chemically synthesized
tgcaaggtaggttgaggtag

SEQ ID NO: 46933 - DNA, 20 bp, Artificial Sequence
  chemically synthesized
ggtaggttgaggtaggggcc

SEQ ID NO: 46934 - DNA, 20 bp, Artificial Sequence
  chemically synthesized
gtaggttgaggtaggggcca

SEQ ID NO: 46935 - DNA, 20 bp, Artificial Sequence
  chemically synthesized
aggttgaggtaggggccaag

SEQ ID NO: 46936 - DNA, 20 bp, Artificial Sequence
  chemically synthesized
ggttgaggtaggggccaagg

SEQ ID NO: 46937 - DNA, 20 bp, Artificial Sequence
  chemically synthesized
ttgaggtaggggccaaggag

SEQ ID NO: 46938 - DNA, 20 bp, Artificial Sequence
  chemically synthesized
gtaggggccaaggaggagca

SEQ ID NO: 46939 - DNA, 20 bp, Artificial Sequence
  chemically synthesized
aggggccaaggaggagcatg

SEQ ID NO: 46940 - DNA, 20 bp, Artificial Sequence
  chemically synthesized
ccaaggaggagcatggagtt

SEQ ID NO: 46941 - DNA, 20 bp, Artificial Sequence
  chemically synthesized
ggagtttggacttgattcat

SEQ ID NO: 46942 - DNA, 20 bp, Artificial Sequence
  chemically synthesized
gagtttggacttgattcatg

SEQ ID NO: 46943 - DNA, 20 bp, Artificial Sequence
  chemically synthesized
ggacttgattcatgaggctg

SEQ ID NO: 46944 - DNA, 20 bp, Artificial Sequence
  chemically synthesized
gacttgattcatgaggctgt

SEQ ID NO: 46945 - DNA, 20 bp, Artificial Sequence
  chemically synthesized
acttgattcatgaggctgtg

SEQ ID NO: 46946 - DNA, 20 bp, Artificial Sequence
  chemically synthesized
ttgattcatgaggctgtggg

SEQ ID NO: 46947 - DNA, 20 bp, Artificial Sequence
  chemically synthesized
ttcatgaggctgtggggagc

SEQ ID NO: 46948 - DNA, 20 bp, Artificial Sequence
  chemically synthesized
gaggctgtggggagccagtg

SEQ ID NO: 46949 - DNA, 20 bp, Artificial Sequence
  chemically synthesized
aggctgtggggagccagtga

SEQ ID NO: 46950 - DNA, 20 bp, Artificial Sequence
  chemically synthesized
gggagccagtgaaggttctt

SEQ ID NO: 46951 - DNA, 20 bp, Artificial Sequence
  chemically synthesized
agccagtgaaggttcttaag

SEQ ID NO: 46952 - DNA, 20 bp, Artificial Sequence
  chemically synthesized
gccagtgaaggttcttaagc

SEQ ID NO: 46953 - DNA, 20 bp, Artificial Sequence
  chemically synthesized
ttaagcaggtatgtctgcct

SEQ ID NO: 46954 - DNA, 20 bp, Artificial Sequence
  chemically synthesized
aagcaggtatgtctgcctga

SEQ ID NO: 46955 - DNA, 20 bp, Artificial Sequence
  chemically synthesized
caggtatgtctgcctgagag

SEQ ID NO: 46956 - DNA, 20 bp, Artificial Sequence
  chemically synthesized
tatgtctgcctgagagcagt

SEQ ID NO: 46957 - DNA, 20 bp, Artificial Sequence
  chemically synthesized
tgtctgcctgagagcagttg

SEQ ID NO: 46958 - DNA, 20 bp, Artificial Sequence
  chemically synthesized
ctgcctgagagcagttggag

SEQ ID NO: 46959 - DNA, 20 bp, Artificial Sequence
  chemically synthesized
tgagagcagttggagcagac

SEQ ID NO: 46960 - DNA, 20 bp, Artificial Sequence
  chemically synthesized
agagcagttggagcagacaa

SEQ ID NO: 46961 - DNA, 20 bp, Artificial Sequence
  chemically synthesized
aaaaaccaaacaaatcacca

SEQ ID NO: 46962 - DNA, 20 bp, Artificial Sequence
  chemically synthesized
accaaacaaatcaccataga

SEQ ID NO: 46963 - DNA, 20 bp, Artificial Sequence
  chemically synthesized
aaacaaatcaccatagatag

SEQ ID NO: 46964 - DNA, 20 bp, Artificial Sequence
  chemically synthesized
tgtcccctccaaatctcatg

SEQ ID NO: 46965 - DNA, 20 bp, Artificial Sequence
  chemically synthesized
ccaaatctcatgtggaaatt

SEQ ID NO: 46966 - DNA, 20 bp, Artificial Sequence
  chemically synthesized
tcatgtggaaatttggtcct

SEQ ID NO: 46967 - DNA, 20 bp, Artificial Sequence
  chemically synthesized
ggaaatttggtcctcagtgt

SEQ ID NO: 46968 - DNA, 20 bp, Artificial Sequence
  chemically synthesized
aatttggtcctcagtgttgg

SEQ ID NO: 46969 - DNA, 20 bp, Artificial Sequence
  chemically synthesized
ttggtcctcagtgttggaag

SEQ ID NO: 46970 - DNA, 20 bp, Artificial Sequence
  chemically synthesized
tggtcctcagtgttggaagt

SEQ ID NO: 46971 - DNA, 20 bp, Artificial Sequence
  chemically synthesized
ggtcctcagtgttggaagtg

SEQ ID NO: 46972 - DNA, 20 bp, Artificial Sequence
  chemically synthesized
gtgttggaagtggggcctaa

SEQ ID NO: 46973 - DNA, 20 bp, Artificial Sequence
  chemically synthesized
tgttggaagtggggcctaat

SEQ ID NO: 46974 - DNA, 20 bp, Artificial Sequence
  chemically synthesized
ttggaagtggggcctaatgg

SEQ ID NO: 46975 - DNA, 20 bp, Artificial Sequence
  chemically synthesized
tggaagtggggcctaatggg

SEQ ID NO: 46976 - DNA, 20 bp, Artificial Sequence
  chemically synthesized
ggggcctaatgggaggtgtt

SEQ ID NO: 46977 - DNA, 20 bp, Artificial Sequence
  chemically synthesized
gggcctaatgggaggtgttt

SEQ ID NO: 46978 - DNA, 20 bp, Artificial Sequence
  chemically synthesized
aatgggaggtgtttgggtca

SEQ ID NO: 46979 - DNA, 20 bp, Artificial Sequence
  chemically synthesized
atgggaggtgtttgggtcat

SEQ ID NO: 46980 - DNA, 20 bp, Artificial Sequence
  chemically synthesized
tgggaggtgtttgggtcatg

SEQ ID NO: 46981 - DNA, 20 bp, Artificial Sequence
  chemically synthesized
gggaggtgtttgggtcatgg

SEQ ID NO: 46982 - DNA, 20 bp, Artificial Sequence
  chemically synthesized
gaggtgtttgggtcatgggg

SEQ ID NO: 46983 - DNA, 20 bp, Artificial Sequence
  chemically synthesized
aggtgtttgggtcatggggg

SEQ ID NO: 46984 - DNA, 20 bp, Artificial Sequence
  chemically synthesized
tgggggaggaacccctgtga

SEQ ID NO: 46985 - DNA, 20 bp, Artificial Sequence
  chemically synthesized
gggggaggaacccctgtgaa

SEQ ID NO: 46986 - DNA, 20 bp, Artificial Sequence
  chemically synthesized
aggaacccctgtgaaaggct

SEQ ID NO: 46987 - DNA, 20 bp, Artificial Sequence
  chemically synthesized
ggtgccgtccttgtgataat

SEQ ID NO: 46988 - DNA, 20 bp, Artificial Sequence
  chemically synthesized
ccgtccttgtgataatgagt

SEQ ID NO: 46989 - DNA, 20 bp, Artificial Sequence
  chemically synthesized
tcccgctatgatttcccttg

SEQ ID NO: 46990 - DNA, 20 bp, Artificial Sequence
  chemically synthesized
cccgctatgatttcccttga

SEQ ID NO: 46991 - DNA, 20 bp, Artificial Sequence
  chemically synthesized
cttgaaggctgattattaaa

SEQ ID NO: 46992 - DNA, 20 bp, Artificial Sequence
  chemically synthesized
tgaaggctgattattaaaaa

SEQ ID NO: 46993 - DNA, 20 bp, Artificial Sequence
  chemically synthesized
gctgattattaaaaagagct

SEQ ID NO: 46994 - DNA, 20 bp, Artificial Sequence
  chemically synthesized
gtgattgatctctgcacatg

SEQ ID NO: 46995 - DNA, 20 bp, Artificial Sequence
  chemically synthesized
tgattgatctctgcacatgt

SEQ ID NO: 46996 - DNA, 20 bp, Artificial Sequence
  chemically synthesized
tccccttcaccttctgccat

SEQ ID NO: 46997 - DNA, 20 bp, Artificial Sequence
  chemically synthesized
tcaccttctgccatcagtga

SEQ ID NO: 46998 - DNA, 20 bp, Artificial Sequence
  chemically synthesized
ccttctgccatcagtgaaag

SEQ ID NO: 46999 - DNA, 20 bp, Artificial Sequence
  chemically synthesized
gccatcagtgaaagcagctt

SEQ ID NO: 47000 - DNA, 20 bp, Artificial Sequence
  chemically synthesized
ccatcagtgaaagcagctta

SEQ ID NO: 47001 - DNA, 20 bp, Artificial Sequence
  chemically synthesized
aagcagcttaaggccctcac

SEQ ID NO: 47002 - DNA, 20 bp, Artificial Sequence
  chemically synthesized
cagcttaaggccctcaccag

SEQ ID NO: 47003 - DNA, 20 bp, Artificial Sequence
  chemically synthesized
cttaaggccctcaccagaag

SEQ ID NO: 47004 - DNA, 20 bp, Artificial Sequence
  chemically synthesized
ccctcaccagaagcagatgc

SEQ ID NO: 47005 - DNA, 20 bp, Artificial Sequence
  chemically synthesized
gatgctggtgccatgcttcc

SEQ ID NO: 47006 - DNA, 20 bp, Artificial Sequence
  chemically synthesized
tgctggtgccatgcttcctg

SEQ ID NO: 47007 - DNA, 20 bp, Artificial Sequence
  chemically synthesized
ctggtgccatgcttcctgga

SEQ ID NO: 47008 - DNA, 20 bp, Artificial Sequence
  chemically synthesized
catgcttcctggagagcttg

SEQ ID NO: 47009 - DNA, 20 bp, Artificial Sequence
  chemically synthesized
tggagagcttgcagaatcat

SEQ ID NO: 47010 - DNA, 20 bp, Artificial Sequence
  chemically synthesized
ccttgtaaattactcacctt

SEQ ID NO: 47011 - DNA, 20 bp, Artificial Sequence
  chemically synthesized
cttgtaaattactcaccttc

SEQ ID NO: 47012 - DNA, 20 bp, Artificial Sequence
  chemically synthesized
ccttcaggtattcctttata

SEQ ID NO: 47013 - DNA, 20 bp, Artificial Sequence
  chemically synthesized
tcctttatatagcaacacaa

SEQ ID NO: 47014 - DNA, 20 bp, Artificial Sequence
  chemically synthesized
cctttatatagcaacacaaa

SEQ ID NO: 47015 - DNA, 20 bp, Artificial Sequence
  chemically synthesized
tatagcaacacaaaaggact

SEQ ID NO: 47016 - DNA, 20 bp, Artificial Sequence
  chemically synthesized
gcaacacaaaaggactaaga

SEQ ID NO: 47017 - DNA, 20 bp, Artificial Sequence
  chemically synthesized
acacaaaaggactaagacag

SEQ ID NO: 47018 - DNA, 20 bp, Artificial Sequence
  chemically synthesized
cttgacttttctctctcttt

SEQ ID NO: 47019 - DNA, 20 bp, Artificial Sequence
  chemically synthesized
gacttttctctctctttaag

SEQ ID NO: 47020 - DNA, 20 bp, Artificial Sequence
  chemically synthesized
aagtgttgcctttgctcact

SEQ ID NO: 47021 - DNA, 20 bp, Artificial Sequence
  chemically synthesized
atcccttctgcctgcatttg

SEQ ID NO: 47022 - DNA, 20 bp, Artificial Sequence
  chemically synthesized
cccttctgcctgcatttgta

SEQ ID NO: 47023 - DNA, 20 bp, Artificial Sequence
  chemically synthesized
gcctgcatttgtagagcatc

SEQ ID NO: 47024 - DNA, 20 bp, Artificial Sequence
  chemically synthesized
gcatttgtagagcatctgga

SEQ ID NO: 47025 - DNA, 20 bp, Artificial Sequence
  chemically synthesized
catttgtagagcatctggat

SEQ ID NO: 47026 - DNA, 20 bp, Artificial Sequence
  chemically synthesized
tttgtagagcatctggatgg

SEQ ID NO: 47027 - DNA, 20 bp, Artificial Sequence
  chemically synthesized
accgtcactcttgactttcc

SEQ ID NO: 47028 - DNA, 20 bp, Artificial Sequence
  chemically synthesized
gtcactcttgactttcccag

SEQ ID NO: 47029 - DNA, 20 bp, Artificial Sequence
  chemically synthesized
tcactcttgactttcccagc

SEQ ID NO: 47030 - DNA, 20 bp, Artificial Sequence
  chemically synthesized
ttcccagcaggcctatgtca

SEQ ID NO: 47031 - DNA, 20 bp, Artificial Sequence
  chemically synthesized
tcccagcaggcctatgtcat

SEQ ID NO: 47032 - DNA, 20 bp, Artificial Sequence
  chemically synthesized
ggcctatgtcataggtactg

SEQ ID NO: 47033 - DNA, 20 bp, Artificial Sequence
  chemically synthesized
gtactgtggtctctacaata

SEQ ID NO: 47034 - DNA, 20 bp, Artificial Sequence
  chemically synthesized
ctgtggtctctacaatacag

SEQ ID NO: 47035 - DNA, 20 bp, Artificial Sequence
  chemically synthesized
gtggtctctacaatacagca

SEQ ID NO: 47036 - DNA, 20 bp, Artificial Sequence
  chemically synthesized
tggtctctacaatacagcag

SEQ ID NO: 47037 - DNA, 20 bp, Artificial Sequence
  chemically synthesized
acaatacagcagaggtatct

SEQ ID NO: 47038 - DNA, 20 bp, Artificial Sequence
  chemically synthesized
caatacagcagaggtatctg

SEQ ID NO: 47039 - DNA, 20 bp, Artificial Sequence
  chemically synthesized
gcagaggtatctgaggctcc

SEQ ID NO: 47040 - DNA, 20 bp, Artificial Sequence
  chemically synthesized
agaggtatctgaggctccga

SEQ ID NO: 47041 - DNA, 20 bp, Artificial Sequence
  chemically synthesized
gaggtatctgaggctccgag

SEQ ID NO: 47042 - DNA, 20 bp, Artificial Sequence
  chemically synthesized
atctgaggctccgagaggtt

SEQ ID NO: 47043 - DNA, 20 bp, Artificial Sequence
  chemically synthesized
gaggttgagtgacttgctca

SEQ ID NO: 47044 - DNA, 20 bp, Artificial Sequence
  chemically synthesized
cttgctcatggctgcacaac

SEQ ID NO: 47045 - DNA, 20 bp, Artificial Sequence
  chemically synthesized
gctgcacaaccagtaaatat

SEQ ID NO: 47046 - DNA, 20 bp, Artificial Sequence
  chemically synthesized
tgcacaaccagtaaatattg

SEQ ID NO: 47047 - DNA, 20 bp, Artificial Sequence
  chemically synthesized
caaccagtaaatattggagc

SEQ ID NO: 47048 - DNA, 20 bp, Artificial Sequence
  chemically synthesized
taaatattggagctggaatt

SEQ ID NO: 47049 - DNA, 20 bp, Artificial Sequence
  chemically synthesized
aaatattggagctggaattc

SEQ ID NO: 47050 - DNA, 20 bp, Artificial Sequence
  chemically synthesized
ggagctggaattcaggtcca

SEQ ID NO: 47051 - DNA, 20 bp, Artificial Sequence
  chemically synthesized
aattcaggtccacggtttcc

SEQ ID NO: 47052 - DNA, 20 bp, Artificial Sequence
  chemically synthesized
tccacggtttcctggctcca

SEQ ID NO: 47053 - DNA, 20 bp, Artificial Sequence
  chemically synthesized
ttccctcaatttattctgac

SEQ ID NO: 47054 - DNA, 20 bp, Artificial Sequence
  chemically synthesized
tccctcaatttattctgact

SEQ ID NO: 47055 - DNA, 20 bp, Artificial Sequence
  chemically synthesized
ccctcaatttattctgactg

SEQ ID NO: 47056 - DNA, 20 bp, Artificial Sequence
  chemically synthesized
aatttattctgactggggca

SEQ ID NO: 47057 - DNA, 20 bp, Artificial Sequence
  chemically synthesized
atttattctgactggggcat

SEQ ID NO: 47058 - DNA, 20 bp, Artificial Sequence
  chemically synthesized
tttattctgactggggcatg

SEQ ID NO: 47059 - DNA, 20 bp, Artificial Sequence
  chemically synthesized
ttattctgactggggcatgg

SEQ ID NO: 47060 - DNA, 20 bp, Artificial Sequence
  chemically synthesized
attctgactggggcatgggg

SEQ ID NO: 47061 - DNA, 20 bp, Artificial Sequence
  chemically synthesized
ttctgactggggcatggggg

SEQ ID NO: 47062 - DNA, 20 bp, Artificial Sequence
  chemically synthesized
tctgactggggcatggggga

SEQ ID NO: 47063 - DNA, 20 bp, Artificial Sequence
  chemically synthesized
ctgactggggcatgggggag

SEQ ID NO: 47064 - DNA, 20 bp, Artificial Sequence
  chemically synthesized
tgactggggcatgggggagg

SEQ ID NO: 47065 - DNA, 20 bp, Artificial Sequence
  chemically synthesized
ctggggcatgggggaggggg

SEQ ID NO: 47066 - DNA, 20 bp, Artificial Sequence
  chemically synthesized
atgggggagggggtggcctt

SEQ ID NO: 47067 - DNA, 20 bp, Artificial Sequence
  chemically synthesized
tgggggagggggtggccttt

SEQ ID NO: 47068 - DNA, 20 bp, Artificial Sequence
  chemically synthesized
gggagggggtggcctttggg

SEQ ID NO: 47069 - DNA, 20 bp, Artificial Sequence
  chemically synthesized
ggagggggtggcctttgggc

SEQ ID NO: 47070 - DNA, 20 bp, Artificial Sequence
  chemically synthesized
gagggggtggcctttgggca

SEQ ID NO: 47071 - DNA, 20 bp, Artificial Sequence
  chemically synthesized
tggcctttgggcagggccac

SEQ ID NO: 47072 - DNA, 20 bp, Artificial Sequence
  chemically synthesized
ggcctttgggcagggccacc

SEQ ID NO: 47073 - DNA, 20 bp, Artificial Sequence
  chemically synthesized
cctttgggcagggccaccag

SEQ ID NO: 47074 - DNA, 20 bp, Artificial Sequence
  chemically synthesized
gcagggccaccaggagcgac

SEQ ID NO: 47075 - DNA, 20 bp, Artificial Sequence
  chemically synthesized
cagggccaccaggagcgacc

SEQ ID NO: 47076 - DNA, 20 bp, Artificial Sequence
  chemically synthesized
accaggagcgaccaggcccg

SEQ ID NO: 47077 - DNA, 20 bp, Artificial Sequence
  chemically synthesized
caggagcgaccaggcccgta

SEQ ID NO: 47078 - DNA, 20 bp, Artificial Sequence
  chemically synthesized
ggagcgaccaggcccgtaga

SEQ ID NO: 47079 - DNA, 20 bp, Artificial Sequence
  chemically synthesized
cgaccaggcccgtagagagc

SEQ ID NO: 47080 - DNA, 20 bp, Artificial Sequence
  chemically synthesized
gaccaggcccgtagagagct

SEQ ID NO: 47081 - DNA, 20 bp, Artificial Sequence
  chemically synthesized
ggcccgtagagagctgggtg

SEQ ID NO: 47082 - DNA, 20 bp, Artificial Sequence
  chemically synthesized
gcccgtagagagctgggtgc

SEQ ID NO: 47083 - DNA, 20 bp, Artificial Sequence
  chemically synthesized
tagagagctgggtgcaggta

SEQ ID NO: 47084 - DNA, 20 bp, Artificial Sequence
  chemically synthesized
gagagctgggtgcaggtaca

SEQ ID NO: 47085 - DNA, 20 bp, Artificial Sequence
  chemically synthesized
agagctgggtgcaggtacag

SEQ ID NO: 47086 - DNA, 20 bp, Artificial Sequence
  chemically synthesized
acagaggaaaacctgttgtc

SEQ ID NO: 47087 - DNA, 20 bp, Artificial Sequence
  chemically synthesized
ggaaaacctgttgtcgagtg

SEQ ID NO: 47088 - DNA, 20 bp, Artificial Sequence
  chemically synthesized
ctgttgtcgagtgtggcccg

SEQ ID NO: 47089 - DNA, 20 bp, Artificial Sequence
  chemically synthesized
agttcccatttttgcctgaa

SEQ ID NO: 47090 - DNA, 20 bp, Artificial Sequence
  chemically synthesized
tgcctgaatggcacatttga

SEQ ID NO: 47091 - DNA, 20 bp, Artificial Sequence
  chemically synthesized
tataaccatgtgaataataa

SEQ ID NO: 47092 - DNA, 20 bp, Artificial Sequence
  chemically synthesized
accatgtgaataataatagt

SEQ ID NO: 47093 - DNA, 20 bp, Artificial Sequence
  chemically synthesized
taataatagttggcctatat

SEQ ID NO: 47094 - DNA, 20 bp, Artificial Sequence
  chemically synthesized
gagttctttaatttgctttt

SEQ ID NO: 47095 - DNA, 20 bp, Artificial Sequence
  chemically synthesized
tttgctttttggtccgcatt

SEQ ID NO: 47096 - DNA, 20 bp, Artificial Sequence
  chemically synthesized
tctcttttgttgtaatttgt

SEQ ID NO: 47097 - DNA, 20 bp, Artificial Sequence
  chemically synthesized
cttttgttgtaatttgtaag

SEQ ID NO: 47098 - DNA, 20 bp, Artificial Sequence
  chemically synthesized
ttttgttgtaatttgtaagt

SEQ ID NO: 47099 - DNA, 20 bp, Artificial Sequence
  chemically synthesized
tttgttgtaatttgtaagta

SEQ ID NO: 47100 - DNA, 20 bp, Artificial Sequence
  chemically synthesized
ttgttgtaatttgtaagtag

SEQ ID NO: 47101 - DNA, 20 bp, Artificial Sequence
  chemically synthesized
tgtaatttgtaagtaggggt

SEQ ID NO: 47102 - DNA, 20 bp, Artificial Sequence
  chemically synthesized
ttgtaagtaggggtgagata

SEQ ID NO: 47103 - DNA, 20 bp, Artificial Sequence
  chemically synthesized
ggggtgagataaagtacacc

SEQ ID NO: 47104 - DNA, 20 bp, Artificial Sequence
  chemically synthesized
gggtgagataaagtacacct

SEQ ID NO: 47105 - DNA, 20 bp, Artificial Sequence
  chemically synthesized
ggtgagataaagtacaccta

SEQ ID NO: 47106 - DNA, 20 bp, Artificial Sequence
  chemically synthesized
aaagtacacctagggtttgc

SEQ ID NO: 47107 - DNA, 20 bp, Artificial Sequence
  chemically synthesized
aagtacacctagggtttgct

SEQ ID NO: 47108 - DNA, 20 bp, Artificial Sequence
  chemically synthesized
tcatcatgttcctccttgca

SEQ ID NO: 47109 - DNA, 20 bp, Artificial Sequence
  chemically synthesized
catcatgttcctccttgcat

SEQ ID NO: 47110 - DNA, 20 bp, Artificial Sequence
  chemically synthesized
atcatgttcctccttgcatg

SEQ ID NO: 47111 - DNA, 20 bp, Artificial Sequence
  chemically synthesized
tgttcctccttgcatggggc

SEQ ID NO: 47112 - DNA, 20 bp, Artificial Sequence
  chemically synthesized
gttcctccttgcatggggcc

SEQ ID NO: 47113 - DNA, 20 bp, Artificial Sequence
  chemically synthesized
ttgcatggggccaggatccg

SEQ ID NO: 47114 - DNA, 20 bp, Artificial Sequence
  chemically synthesized
gcatggggccaggatccgtg

SEQ ID NO: 47115 - DNA, 20 bp, Artificial Sequence
  chemically synthesized
catggggccaggatccgtgg

SEQ ID NO: 47116 - DNA, 20 bp, Artificial Sequence
  chemically synthesized
caggatccgtggaggttgcc

SEQ ID NO: 47117 - DNA, 20 bp, Artificial Sequence
  chemically synthesized
gaggttgcctggcacctacg

SEQ ID NO: 47118 - DNA, 20 bp, Artificial Sequence
  chemically synthesized
gttgcctggcacctacgtgg

SEQ ID NO: 47119 - DNA, 20 bp, Artificial Sequence
  chemically synthesized
gcacctacgtggtggtgctg

SEQ ID NO: 47120 - DNA, 20 bp, Artificial Sequence
  chemically synthesized
cacctacgtggtggtgctga

SEQ ID NO: 47121 - DNA, 20 bp, Artificial Sequence
  chemically synthesized
cctacgtggtggtgctgaag

SEQ ID NO: 47122 - DNA, 20 bp, Artificial Sequence
  chemically synthesized
ctacgtggtggtgctgaagg

SEQ ID NO: 47123 - DNA, 20 bp, Artificial Sequence
  chemically synthesized
acgtggtggtgctgaaggag

SEQ ID NO: 47124 - DNA, 20 bp, Artificial Sequence
  chemically synthesized
aggaggagacccacctctcg

SEQ ID NO: 47125 - DNA, 20 bp, Artificial Sequence
  chemically synthesized
ggagacccacctctcgcagt

SEQ ID NO: 47126 - DNA, 20 bp, Artificial Sequence
  chemically synthesized
agacccacctctcgcagtca

SEQ ID NO: 47127 - DNA, 20 bp, Artificial Sequence
  chemically synthesized
agcgcactgcccgccgcctg

SEQ ID NO: 47128 - DNA, 20 bp, Artificial Sequence
  chemically synthesized
gcgcactgcccgccgcctgc

SEQ ID NO: 47129 - DNA, 20 bp, Artificial Sequence
  chemically synthesized
ctgcccgccgcctgcaggcc

SEQ ID NO: 47130 - DNA, 20 bp, Artificial Sequence
  chemically synthesized
tgcccgccgcctgcaggccc

SEQ ID NO: 47131 - DNA, 20 bp, Artificial Sequence
  chemically synthesized
tgcaggcccaggctgcccgc

SEQ ID NO: 47132 - DNA, 20 bp, Artificial Sequence
  chemically synthesized
gcaggcccaggctgcccgcc

SEQ ID NO: 47133 - DNA, 20 bp, Artificial Sequence
  chemically synthesized
caggcccaggctgcccgccg

SEQ ID NO: 47134 - DNA, 20 bp, Artificial Sequence
  chemically synthesized
cccgccggggatacctcacc

SEQ ID NO: 47135 - DNA, 20 bp, Artificial Sequence
  chemically synthesized
aagatcctgcatgtcttcca

SEQ ID NO: 47136 - DNA, 20 bp, Artificial Sequence
  chemically synthesized
gtcttccatggccttcttcc

SEQ ID NO: 47137 - DNA, 20 bp, Artificial Sequence
  chemically synthesized
tggccttcttcctggcttcc

SEQ ID NO: 47138 - DNA, 20 bp, Artificial Sequence
  chemically synthesized
ttcttcctggcttcctggtg

SEQ ID NO: 47139 - DNA, 20 bp, Artificial Sequence
  chemically synthesized
cctggcttcctggtgaagat

SEQ ID NO: 47140 - DNA, 20 bp, Artificial Sequence
  chemically synthesized
ggcttcctggtgaagatgag

SEQ ID NO: 47141 - DNA, 20 bp, Artificial Sequence
  chemically synthesized
gaagatgagtggcgacctgc

SEQ ID NO: 47142 - DNA, 20 bp, Artificial Sequence
  chemically synthesized
agatgagtggcgacctgctg

SEQ ID NO: 47143 - DNA, 20 bp, Artificial Sequence
  chemically synthesized
gagtggcgacctgctggagc

SEQ ID NO: 47144 - DNA, 20 bp, Artificial Sequence
  chemically synthesized
ggcgacctgctggagctggt

SEQ ID NO: 47145 - DNA, 20 bp, Artificial Sequence
  chemically synthesized
agctggtgagccaccctttt

SEQ ID NO: 47146 - DNA, 20 bp, Artificial Sequence
  chemically synthesized
gctggtgagccacccttttt

SEQ ID NO: 47147 - DNA, 20 bp, Artificial Sequence
  chemically synthesized
tgagccaccctttttgggaa

SEQ ID NO: 47148 - DNA, 20 bp, Artificial Sequence
  chemically synthesized
ttgggaatggcacttcctga

SEQ ID NO: 47149 - DNA, 20 bp, Artificial Sequence
  chemically synthesized
tgggaatggcacttcctgat

SEQ ID NO: 47150 - DNA, 20 bp, Artificial Sequence
  chemically synthesized
gggaatggcacttcctgata

SEQ ID NO: 47151 - DNA, 20 bp, Artificial Sequence
  chemically synthesized
atggcacttcctgatagggc

SEQ ID NO: 47152 - DNA, 20 bp, Artificial Sequence
  chemically synthesized
tggcacttcctgatagggct

SEQ ID NO: 47153 - DNA, 20 bp, Artificial Sequence
  chemically synthesized
ctgggccactgcatatacac

SEQ ID NO: 47154 - DNA, 20 bp, Artificial Sequence
  chemically synthesized
tgggccactgcatatacact

SEQ ID NO: 47155 - DNA, 20 bp, Artificial Sequence
  chemically synthesized
gggccactgcatatacactg

SEQ ID NO: 47156 - DNA, 20 bp, Artificial Sequence
  chemically synthesized
tatacactggggactgtgct

SEQ ID NO: 47157 - DNA, 20 bp, Artificial Sequence
  chemically synthesized
acactggggactgtgcttag

SEQ ID NO: 47158 - DNA, 20 bp, Artificial Sequence
  chemically synthesized
cactggggactgtgcttagt

SEQ ID NO: 47159 - DNA, 20 bp, Artificial Sequence
  chemically synthesized
gtaggcccattgctgaaaat

SEQ ID NO: 47160 - DNA, 20 bp, Artificial Sequence
  chemically synthesized
ggcccattgctgaaaatcag

SEQ ID NO: 47161 - DNA, 20 bp, Artificial Sequence
  chemically synthesized
gcccattgctgaaaatcaga

SEQ ID NO: 47162 - DNA, 20 bp, Artificial Sequence
  chemically synthesized
cccattgctgaaaatcagaa

SEQ ID NO: 47163 - DNA, 20 bp, Artificial Sequence
  chemically synthesized
ccattgctgaaaatcagaag

SEQ ID NO: 47164 - DNA, 20 bp, Artificial Sequence
  chemically synthesized
tgctgaaaatcagaagggga

SEQ ID NO: 47165 - DNA, 20 bp, Artificial Sequence
  chemically synthesized
gaaaatcagaaggggacagc

SEQ ID NO: 47166 - DNA, 20 bp, Artificial Sequence
  chemically synthesized
ggggacagcaagtatgtatt

SEQ ID NO: 47167 - DNA, 20 bp, Artificial Sequence
  chemically synthesized
agtatgtattgagcacttat

SEQ ID NO: 47168 - DNA, 20 bp, Artificial Sequence
  chemically synthesized
gtatgtattgagcacttatc

SEQ ID NO: 47169 - DNA, 20 bp, Artificial Sequence
  chemically synthesized
ttgagcacttatcgggtacc

SEQ ID NO: 47170 - DNA, 20 bp, Artificial Sequence
  chemically synthesized
cacttatcgggtaccaagca

SEQ ID NO: 47171 - DNA, 20 bp, Artificial Sequence
  chemically synthesized
gtaccaagcacagtaactac

SEQ ID NO: 47172 - DNA, 20 bp, Artificial Sequence
  chemically synthesized
gtaactactggctttctgta

SEQ ID NO: 47173 - DNA, 20 bp, Artificial Sequence
  chemically synthesized
ttctgtatagaattcccttt

SEQ ID NO: 47174 - DNA, 20 bp, Artificial Sequence
  chemically synthesized
tatagaattccctttaagcc

SEQ ID NO: 47175 - DNA, 20 bp, Artificial Sequence
  chemically synthesized
ctttaagcctggccatgccc

SEQ ID NO: 47176 - DNA, 20 bp, Artificial Sequence
  chemically synthesized
taagcctggccatgccccag

SEQ ID NO: 47177 - DNA, 20 bp, Artificial Sequence
  chemically synthesized
gtacgtctatcttcatttga

SEQ ID NO: 47178 - DNA, 20 bp, Artificial Sequence
  chemically synthesized
tctatcttcatttgaaagac

SEQ ID NO: 47179 - DNA, 20 bp, Artificial Sequence
  chemically synthesized
ctatcttcatttgaaagacg

SEQ ID NO: 47180 - DNA, 20 bp, Artificial Sequence
  chemically synthesized
atcttcatttgaaagacgag

SEQ ID NO: 47181 - DNA, 20 bp, Artificial Sequence
  chemically synthesized
tttgaaagacgaggagactg

SEQ ID NO: 47182 - DNA, 20 bp, Artificial Sequence
  chemically synthesized
aagacgaggagactgaagtt

SEQ ID NO: 47183 - DNA, 20 bp, Artificial Sequence
  chemically synthesized
gacgaggagactgaagttca

SEQ ID NO: 47184 - DNA, 20 bp, Artificial Sequence
  chemically synthesized
acgaggagactgaagttcag

SEQ ID NO: 47185 - DNA, 20 bp, Artificial Sequence
  chemically synthesized
cgaggagactgaagttcaga

SEQ ID NO: 47186 - DNA, 20 bp, Artificial Sequence
  chemically synthesized
gaggagactgaagttcagag

SEQ ID NO: 47187 - DNA, 20 bp, Artificial Sequence
  chemically synthesized
gaagttcagaggggaccaca

SEQ ID NO: 47188 - DNA, 20 bp, Artificial Sequence
  chemically synthesized
ttcagaggggaccacacaga

SEQ ID NO: 47189 - DNA, 20 bp, Artificial Sequence
  chemically synthesized
gaggggaccacacagacagc

SEQ ID NO: 47190 - DNA, 20 bp, Artificial Sequence
  chemically synthesized
aggggaccacacagacagct

SEQ ID NO: 47191 - DNA, 20 bp, Artificial Sequence
  chemically synthesized
ggggaccacacagacagcta

SEQ ID NO: 47192 - DNA, 20 bp, Artificial Sequence
  chemically synthesized
gggaccacacagacagctag

SEQ ID NO: 47193 - DNA, 20 bp, Artificial Sequence
  chemically synthesized
accacacagacagctagggg

SEQ ID NO: 47194 - DNA, 20 bp, Artificial Sequence
  chemically synthesized
cacacagacagctaggggta

SEQ ID NO: 47195 - DNA, 20 bp, Artificial Sequence
  chemically synthesized
agacagctaggggtagagcc

SEQ ID NO: 47196 - DNA, 20 bp, Artificial Sequence
  chemically synthesized
agagcctggatcaaacccat

SEQ ID NO: 47197 - DNA, 20 bp, Artificial Sequence
  chemically synthesized
aaacccattggtctgcctgc

SEQ ID NO: 47198 - DNA, 20 bp, Artificial Sequence
  chemically synthesized
gccaatgcatctgctgccta

SEQ ID NO: 47199 - DNA, 20 bp, Artificial Sequence
  chemically synthesized
ctgctgcctacggaaacctg

SEQ ID NO: 47200 - DNA, 20 bp, Artificial Sequence
  chemically synthesized
tgctgcctacggaaacctgt

SEQ ID NO: 47201 - DNA, 20 bp, Artificial Sequence
  chemically synthesized
gctgcctacggaaacctgta

SEQ ID NO: 47202 - DNA, 20 bp, Artificial Sequence
  chemically synthesized
ctacggaaacctgtagggac

SEQ ID NO: 47203 - DNA, 20 bp, Artificial Sequence
  chemically synthesized
tacggaaacctgtagggaca

SEQ ID NO: 47204 - DNA, 20 bp, Artificial Sequence
  chemically synthesized
aacctgtagggacaaggccc

SEQ ID NO: 47205 - DNA, 20 bp, Artificial Sequence
  chemically synthesized
acctgtagggacaaggccct

SEQ ID NO: 47206 - DNA, 20 bp, Artificial Sequence
  chemically synthesized
ggacaaggccctgggatgtt

SEQ ID NO: 47207 - DNA, 20 bp, Artificial Sequence
  chemically synthesized
caaggccctgggatgttcag

SEQ ID NO: 47208 - DNA, 20 bp, Artificial Sequence
  chemically synthesized
aggccctgggatgttcagtg

SEQ ID NO: 47209 - DNA, 20 bp, Artificial Sequence
  chemically synthesized
tgggatgttcagtggagcct

SEQ ID NO: 47210 - DNA, 20 bp, Artificial Sequence
  chemically synthesized
gcctgagtcattttataaaa

SEQ ID NO: 47211 - DNA, 20 bp, Artificial Sequence
  chemically synthesized
tttataaaaaagcatgactc

SEQ ID NO: 47212 - DNA, 20 bp, Artificial Sequence
  chemically synthesized
ttataaaaaagcatgactct

SEQ ID NO: 47213 - DNA, 20 bp, Artificial Sequence
  chemically synthesized
tataaaaaagcatgactcta

SEQ ID NO: 47214 - DNA, 20 bp, Artificial Sequence
  chemically synthesized
tagggtccaaaattcctttg

SEQ ID NO: 47215 - DNA, 20 bp, Artificial Sequence
  chemically synthesized
cctttgaagctgttgctatc

SEQ ID NO: 47216 - DNA, 20 bp, Artificial Sequence
  chemically synthesized
tttgaagctgttgctatcca

SEQ ID NO: 47217 - DNA, 20 bp, Artificial Sequence
  chemically synthesized
agctgttgctatccagagtg

SEQ ID NO: 47218 - DNA, 20 bp, Artificial Sequence
  chemically synthesized
ccagagtgaagtcccttctt

SEQ ID NO: 47219 - DNA, 20 bp, Artificial Sequence
  chemically synthesized
cagagtgaagtcccttcttt

SEQ ID NO: 47220 - DNA, 20 bp, Artificial Sequence
  chemically synthesized
gtgaagtcccttctttagga

SEQ ID NO: 47221 - DNA, 20 bp, Artificial Sequence
  chemically synthesized
tgaagtcccttctttaggac

SEQ ID NO: 47222 - DNA, 20 bp, Artificial Sequence
  chemically synthesized
gaagtcccttctttaggaca

SEQ ID NO: 47223 - DNA, 20 bp, Artificial Sequence
  chemically synthesized
gtcccttctttaggacaggg

SEQ ID NO: 47224 - DNA, 20 bp, Artificial Sequence
  chemically synthesized
agggtggccctcctccctcc

SEQ ID NO: 47225 - DNA, 20 bp, Artificial Sequence
  chemically synthesized
cctcctggatgtcacatctt

SEQ ID NO: 47226 - DNA, 20 bp, Artificial Sequence
  chemically synthesized
cctggatgtcacatcttcgg

SEQ ID NO: 47227 - DNA, 20 bp, Artificial Sequence
  chemically synthesized
tggatgtcacatcttcggtg

SEQ ID NO: 47228 - DNA, 20 bp, Artificial Sequence
  chemically synthesized
ggatgtcacatcttcggtgg

SEQ ID NO: 47229 - DNA, 20 bp, Artificial Sequence
  chemically synthesized
gatgtcacatcttcggtgga

SEQ ID NO: 47230 - DNA, 20 bp, Artificial Sequence
  chemically synthesized
atgtcacatcttcggtggag

SEQ ID NO: 47231 - DNA, 20 bp, Artificial Sequence
  chemically synthesized
tcacatcttcggtggagggg

SEQ ID NO: 47232 - DNA, 20 bp, Artificial Sequence
  chemically synthesized
atcttcggtggaggggcaga

SEQ ID NO: 47233 - DNA, 20 bp, Artificial Sequence
  chemically synthesized
tcttcggtggaggggcagaa

SEQ ID NO: 47234 - DNA, 20 bp, Artificial Sequence
  chemically synthesized
cttcggtggaggggcagaaa

SEQ ID NO: 47235 - DNA, 20 bp, Artificial Sequence
  chemically synthesized
ttcggtggaggggcagaaag

SEQ ID NO: 47236 - DNA, 20 bp, Artificial Sequence
  chemically synthesized
tggaggggcagaaaggggac

SEQ ID NO: 47237 - DNA, 20 bp, Artificial Sequence
  chemically synthesized
ggaggggcagaaaggggact

SEQ ID NO: 47238 - DNA, 20 bp, Artificial Sequence
  chemically synthesized
actgggtattctcctcaccc

SEQ ID NO: 47239 - DNA, 20 bp, Artificial Sequence
  chemically synthesized
tattctcctcaccctggccc

SEQ ID NO: 47240 - DNA, 20 bp, Artificial Sequence
  chemically synthesized
tgtgcttctgcaccaccttc

SEQ ID NO: 47241 - DNA, 20 bp, Artificial Sequence
  chemically synthesized
acaaataaaaacgttttttt

SEQ ID NO: 47242 - DNA, 20 bp, Artificial Sequence
  chemically synthesized
aaacgtttttttaagatttg

SEQ ID NO: 47243 - DNA, 20 bp, Artificial Sequence
  chemically synthesized
ttttttaagatttgaagcac

SEQ ID NO: 47244 - DNA, 20 bp, Artificial Sequence
  chemically synthesized
tttttaagatttgaagcact

SEQ ID NO: 47245 - DNA, 20 bp, Artificial Sequence
  chemically synthesized
ttttaagatttgaagcacta

SEQ ID NO: 47246 - DNA, 20 bp, Artificial Sequence
  chemically synthesized
aagatttgaagcactagggc

SEQ ID NO: 47247 - DNA, 20 bp, Artificial Sequence
  chemically synthesized
agatttgaagcactagggcc

SEQ ID NO: 47248 - DNA, 20 bp, Artificial Sequence
  chemically synthesized
gatttgaagcactagggcca

SEQ ID NO: 47249 - DNA, 20 bp, Artificial Sequence
  chemically synthesized
tgaagcactagggccagggt

SEQ ID NO: 47250 - DNA, 20 bp, Artificial Sequence
  chemically synthesized
gaagcactagggccagggtg

SEQ ID NO: 47251 - DNA, 20 bp, Artificial Sequence
  chemically synthesized
agcactagggccagggtgag

SEQ ID NO: 47252 - DNA, 20 bp, Artificial Sequence
  chemically synthesized
gccagggtgaggagaatacc

SEQ ID NO: 47253 - DNA, 20 bp, Artificial Sequence
  chemically synthesized
ccctttctgcccctccaccg

SEQ ID NO: 47254 - DNA, 20 bp, Artificial Sequence
  chemically synthesized
tccaccgaagatgtgacatc

SEQ ID NO: 47255 - DNA, 20 bp, Artificial Sequence
  chemically synthesized
ccaccgaagatgtgacatcc

SEQ ID NO: 47256 - DNA, 20 bp, Artificial Sequence
  chemically synthesized
accgaagatgtgacatccag

SEQ ID NO: 47257 - DNA, 20 bp, Artificial Sequence
  chemically synthesized
ccgaagatgtgacatccagg

SEQ ID NO: 47258 - DNA, 20 bp, Artificial Sequence
  chemically synthesized
cgaagatgtgacatccagga

SEQ ID NO: 47259 - DNA, 20 bp, Artificial Sequence
  chemically synthesized
aagatgtgacatccaggagg

SEQ ID NO: 47260 - DNA, 20 bp, Artificial Sequence
  chemically synthesized
agatgtgacatccaggaggg

SEQ ID NO: 47261 - DNA, 20 bp, Artificial Sequence
  chemically synthesized
atgtgacatccaggagggag

SEQ ID NO: 47262 - DNA, 20 bp, Artificial Sequence
  chemically synthesized
tgtgacatccaggagggagg

SEQ ID NO: 47263 - DNA, 20 bp, Artificial Sequence
  chemically synthesized
gtgacatccaggagggagga

SEQ ID NO: 47264 - DNA, 20 bp, Artificial Sequence
  chemically synthesized
aggagggccaccctgtccta

SEQ ID NO: 47265 - DNA, 20 bp, Artificial Sequence
  chemically synthesized
agggccaccctgtcctaaag

SEQ ID NO: 47266 - DNA, 20 bp, Artificial Sequence
  chemically synthesized
gggccaccctgtcctaaaga

SEQ ID NO: 47267 - DNA, 20 bp, Artificial Sequence
  chemically synthesized
ggccaccctgtcctaaagaa

SEQ ID NO: 47268 - DNA, 20 bp, Artificial Sequence
  chemically synthesized
ctaaagaagggacttcactc

SEQ ID NO: 47269 - DNA, 20 bp, Artificial Sequence
  chemically synthesized
agaagggacttcactctgga

SEQ ID NO: 47270 - DNA, 20 bp, Artificial Sequence
  chemically synthesized
gacttcactctggatagcaa

SEQ ID NO: 47271 - DNA, 20 bp, Artificial Sequence
  chemically synthesized
tctggatagcaacagcttca

SEQ ID NO: 47272 - DNA, 20 bp, Artificial Sequence
  chemically synthesized
ctggatagcaacagcttcaa

SEQ ID NO: 47273 - DNA, 20 bp, Artificial Sequence
  chemically synthesized
caacagcttcaaaggaattt

SEQ ID NO: 47274 - DNA, 20 bp, Artificial Sequence
  chemically synthesized
ttcaaaggaattttggaccc

SEQ ID NO: 47275 - DNA, 20 bp, Artificial Sequence
  chemically synthesized
caaaggaattttggacccta

SEQ ID NO: 47276 - DNA, 20 bp, Artificial Sequence
  chemically synthesized
tgcttttttataaaatgact

SEQ ID NO: 47277 - DNA, 20 bp, Artificial Sequence
  chemically synthesized
gcttttttataaaatgactc

SEQ ID NO: 47278 - DNA, 20 bp, Artificial Sequence
  chemically synthesized
tcaggctccactgaacatcc

SEQ ID NO: 47279 - DNA, 20 bp, Artificial Sequence
  chemically synthesized
caggctccactgaacatccc

SEQ ID NO: 47280 - DNA, 20 bp, Artificial Sequence
  chemically synthesized
aggctccactgaacatccca

SEQ ID NO: 47281 - DNA, 20 bp, Artificial Sequence
  chemically synthesized
atcccagggccttgtcccta

SEQ ID NO: 47282 - DNA, 20 bp, Artificial Sequence
  chemically synthesized
tcccagggccttgtccctac

SEQ ID NO: 47283 - DNA, 20 bp, Artificial Sequence
  chemically synthesized
cttgtccctacaggtttccg

SEQ ID NO: 47284 - DNA, 20 bp, Artificial Sequence
  chemically synthesized
ttgtccctacaggtttccgt

SEQ ID NO: 47285 - DNA, 20 bp, Artificial Sequence
  chemically synthesized
tccctacaggtttccgtagg

SEQ ID NO: 47286 - DNA, 20 bp, Artificial Sequence
  chemically synthesized
ctacaggtttccgtaggcag

SEQ ID NO: 47287 - DNA, 20 bp, Artificial Sequence
  chemically synthesized
tccgtaggcagcagatgcat

SEQ ID NO: 47288 - DNA, 20 bp, Artificial Sequence
  chemically synthesized
ggcagcagatgcattggcac

SEQ ID NO: 47289 - DNA, 20 bp, Artificial Sequence
  chemically synthesized
cagatgcattggcacaagaa

SEQ ID NO: 47290 - DNA, 20 bp, Artificial Sequence
  chemically synthesized
tgcattggcacaagaatggc

SEQ ID NO: 47291 - DNA, 20 bp, Artificial Sequence
  chemically synthesized
attggcacaagaatggctgg

SEQ ID NO: 47292 - DNA, 20 bp, Artificial Sequence
  chemically synthesized
ttggcacaagaatggctggc

SEQ ID NO: 47293 - DNA, 20 bp, Artificial Sequence
  chemically synthesized
gcacaagaatggctggcagg

SEQ ID NO: 47294 - DNA, 20 bp, Artificial Sequence
  chemically synthesized
atggctggcaggcagaccaa

SEQ ID NO: 47295 - DNA, 20 bp, Artificial Sequence
  chemically synthesized
tggctggcaggcagaccaat

SEQ ID NO: 47296 - DNA, 20 bp, Artificial Sequence
  chemically synthesized
gcagaccaatgggtttgatc

SEQ ID NO: 47297 - DNA, 20 bp, Artificial Sequence
  chemically synthesized
cagaccaatgggtttgatcc

SEQ ID NO: 47298 - DNA, 20 bp, Artificial Sequence
  chemically synthesized
tttgatccaggctctacccc

SEQ ID NO: 47299 - DNA, 20 bp, Artificial Sequence
  chemically synthesized
tctacccctagctgtctgtg

SEQ ID NO: 47300 - DNA, 20 bp, Artificial Sequence
  chemically synthesized
gtgtggtcccctctgaactt

SEQ ID NO: 47301 - DNA, 20 bp, Artificial Sequence
  chemically synthesized
gtctcctcgtctttcaaatg

SEQ ID NO: 47302 - DNA, 20 bp, Artificial Sequence
  chemically synthesized
cctcgtctttcaaatgaaga

SEQ ID NO: 47303 - DNA, 20 bp, Artificial Sequence
  chemically synthesized
aatgaagatagacgtaccac

SEQ ID NO: 47304 - DNA, 20 bp, Artificial Sequence
  chemically synthesized
atgaagatagacgtaccact

SEQ ID NO: 47305 - DNA, 20 bp, Artificial Sequence
  chemically synthesized
tgaagatagacgtaccactg

SEQ ID NO: 47306 - DNA, 20 bp, Artificial Sequence
  chemically synthesized
atagacgtaccactggggca

SEQ ID NO: 47307 - DNA, 20 bp, Artificial Sequence
  chemically synthesized
acgtaccactggggcatggc

SEQ ID NO: 47308 - DNA, 20 bp, Artificial Sequence
  chemically synthesized
cgtaccactggggcatggcc

SEQ ID NO: 47309 - DNA, 20 bp, Artificial Sequence
  chemically synthesized
ctggggcatggccaggctta

SEQ ID NO: 47310 - DNA, 20 bp, Artificial Sequence
  chemically synthesized
tggggcatggccaggcttaa

SEQ ID NO: 47311 - DNA, 20 bp, Artificial Sequence
  chemically synthesized
ggggcatggccaggcttaaa

SEQ ID NO: 47312 - DNA, 20 bp, Artificial Sequence
  chemically synthesized
ggcttaaagggaattctata

SEQ ID NO: 47313 - DNA, 20 bp, Artificial Sequence
  chemically synthesized
taaagggaattctatacaga

SEQ ID NO: 47314 - DNA, 20 bp, Artificial Sequence
  chemically synthesized
gggaattctatacagaaagc

SEQ ID NO: 47315 - DNA, 20 bp, Artificial Sequence
  chemically synthesized
aattctatacagaaagccag

SEQ ID NO: 47316 - DNA, 20 bp, Artificial Sequence
  chemically synthesized
aagccagtagttactgtgct

SEQ ID NO: 47317 - DNA, 20 bp, Artificial Sequence
  chemically synthesized
tactgtgcttggtacccgat

SEQ ID NO: 47318 - DNA, 20 bp, Artificial Sequence
  chemically synthesized
tgctgtccccttctgatttt

SEQ ID NO: 47319 - DNA, 20 bp, Artificial Sequence
  chemically synthesized
ccccttctgattttcagcaa

SEQ ID NO: 47320 - DNA, 20 bp, Artificial Sequence
  chemically synthesized
cccttctgattttcagcaat

SEQ ID NO: 47321 - DNA, 20 bp, Artificial Sequence
  chemically synthesized
ttttcagcaatgggcctact

SEQ ID NO: 47322 - DNA, 20 bp, Artificial Sequence
  chemically synthesized
agcaatgggcctactaagca

SEQ ID NO: 47323 - DNA, 20 bp, Artificial Sequence
  chemically synthesized
ggcctactaagcacagtccc

SEQ ID NO: 47324 - DNA, 20 bp, Artificial Sequence
  chemically synthesized
cacagtccccagtgtatatg

SEQ ID NO: 47325 - DNA, 20 bp, Artificial Sequence
  chemically synthesized
agtccccagtgtatatgcag

SEQ ID NO: 47326 - DNA, 20 bp, Artificial Sequence
  chemically synthesized
ccagtgtatatgcagtggcc

SEQ ID NO: 47327 - DNA, 20 bp, Artificial Sequence
  chemically synthesized
atgcagtggcccagccctat

SEQ ID NO: 47328 - DNA, 20 bp, Artificial Sequence
  chemically synthesized
tgcagtggcccagccctatc

SEQ ID NO: 47329 - DNA, 20 bp, Artificial Sequence
  chemically synthesized
agtggcccagccctatcagg

SEQ ID NO: 47330 - DNA, 20 bp, Artificial Sequence
  chemically synthesized
caggaagtgccattcccaaa

SEQ ID NO: 47331 - DNA, 20 bp, Artificial Sequence
  chemically synthesized
aggaagtgccattcccaaaa

SEQ ID NO: 47332 - DNA, 20 bp, Artificial Sequence
  chemically synthesized
ggaagtgccattcccaaaaa

SEQ ID NO: 47333 - DNA, 20 bp, Artificial Sequence
  chemically synthesized
agtgccattcccaaaaaggg

SEQ ID NO: 47334 - DNA, 20 bp, Artificial Sequence
  chemically synthesized
tcccaaaaagggtggctcac

SEQ ID NO: 47335 - DNA, 20 bp, Artificial Sequence
  chemically synthesized
aaagggtggctcaccagctc

SEQ ID NO: 47336 - DNA, 20 bp, Artificial Sequence
  chemically synthesized
gggtggctcaccagctccag

SEQ ID NO: 47337 - DNA, 20 bp, Artificial Sequence
  chemically synthesized
ggtggctcaccagctccagc

SEQ ID NO: 47338 - DNA, 20 bp, Artificial Sequence
  chemically synthesized
aggtcgccactcatcttcac

SEQ ID NO: 47339 - DNA, 20 bp, Artificial Sequence
  chemically synthesized
ggtcgccactcatcttcacc

SEQ ID NO: 47340 - DNA, 20 bp, Artificial Sequence
  chemically synthesized
cgccactcatcttcaccagg

SEQ ID NO: 47341 - DNA, 20 bp, Artificial Sequence
  chemically synthesized
actcatcttcaccaggaagc

SEQ ID NO: 47342 - DNA, 20 bp, Artificial Sequence
  chemically synthesized
ctcatcttcaccaggaagcc

SEQ ID NO: 47343 - DNA, 20 bp, Artificial Sequence
  chemically synthesized
atcttcaccaggaagccagg

SEQ ID NO: 47344 - DNA, 20 bp, Artificial Sequence
  chemically synthesized
ttcaccaggaagccaggaag

SEQ ID NO: 47345 - DNA, 20 bp, Artificial Sequence
  chemically synthesized
tcaccaggaagccaggaaga

SEQ ID NO: 47346 - DNA, 20 bp, Artificial Sequence
  chemically synthesized
ggaagccaggaagaaggcca

SEQ ID NO: 47347 - DNA, 20 bp, Artificial Sequence
  chemically synthesized
agccaggaagaaggccatgg

SEQ ID NO: 47348 - DNA, 20 bp, Artificial Sequence
  chemically synthesized
agaaggccatggaagacatg

SEQ ID NO: 47349 - DNA, 20 bp, Artificial Sequence
  chemically synthesized
gaaggccatggaagacatgc

SEQ ID NO: 47350 - DNA, 20 bp, Artificial Sequence
  chemically synthesized
atggaagacatgcaggatct

SEQ ID NO: 47351 - DNA, 20 bp, Artificial Sequence
  chemically synthesized
aagacatgcaggatcttggt

SEQ ID NO: 47352 - DNA, 20 bp, Artificial Sequence
  chemically synthesized
agacatgcaggatcttggtg

SEQ ID NO: 47353 - DNA, 20 bp, Artificial Sequence
  chemically synthesized
ggatcttggtgaggtatccc

SEQ ID NO: 47354 - DNA, 20 bp, Artificial Sequence
  chemically synthesized
tcttggtgaggtatccccgg

SEQ ID NO: 47355 - DNA, 20 bp, Artificial Sequence
  chemically synthesized
cttggtgaggtatccccggc

SEQ ID NO: 47356 - DNA, 20 bp, Artificial Sequence
  chemically synthesized
ggtgaggtatccccggcggg

SEQ ID NO: 47357 - DNA, 20 bp, Artificial Sequence
  chemically synthesized
ggtatccccggcgggcagcc

SEQ ID NO: 47358 - DNA, 20 bp, Artificial Sequence
  chemically synthesized
gtatccccggcgggcagcct

SEQ ID NO: 47359 - DNA, 20 bp, Artificial Sequence
  chemically synthesized
cggcgggcagcctgggcctg

SEQ ID NO: 47360 - DNA, 20 bp, Artificial Sequence
  chemically synthesized
ggcgggcagcctgggcctgc

SEQ ID NO: 47361 - DNA, 20 bp, Artificial Sequence
  chemically synthesized
gggcagcctgggcctgcagg

SEQ ID NO: 47362 - DNA, 20 bp, Artificial Sequence
  chemically synthesized
cagcctgggcctgcaggcgg

SEQ ID NO: 47363 - DNA, 20 bp, Artificial Sequence
  chemically synthesized
agcctgggcctgcaggcggc

SEQ ID NO: 47364 - DNA, 20 bp, Artificial Sequence
  chemically synthesized
ctgggcctgcaggcggcggg

SEQ ID NO: 47365 - DNA, 20 bp, Artificial Sequence
  chemically synthesized
gggcagtgcgctctgactgc

SEQ ID NO: 47366 - DNA, 20 bp, Artificial Sequence
  chemically synthesized
gcagtgcgctctgactgcga

SEQ ID NO: 47367 - DNA, 20 bp, Artificial Sequence
  chemically synthesized
cagtgcgctctgactgcgag

SEQ ID NO: 47368 - DNA, 20 bp, Artificial Sequence
  chemically synthesized
tgcgctctgactgcgagagg

SEQ ID NO: 47369 - DNA, 20 bp, Artificial Sequence
  chemically synthesized
gcgctctgactgcgagaggt

SEQ ID NO: 47370 - DNA, 20 bp, Artificial Sequence
  chemically synthesized
gagaggtgggtctcctcctt

SEQ ID NO: 47371 - DNA, 20 bp, Artificial Sequence
  chemically synthesized
cctccttcagcaccaccacg

SEQ ID NO: 47372 - DNA, 20 bp, Artificial Sequence
  chemically synthesized
ctccttcagcaccaccacgt

SEQ ID NO: 47373 - DNA, 20 bp, Artificial Sequence
  chemically synthesized
cagcaccaccacgtaggtgc

SEQ ID NO: 47374 - DNA, 20 bp, Artificial Sequence
  chemically synthesized
agcaccaccacgtaggtgcc

SEQ ID NO: 47375 - DNA, 20 bp, Artificial Sequence
  chemically synthesized
taggtgccaggcaacctcca

SEQ ID NO: 47376 - DNA, 20 bp, Artificial Sequence
  chemically synthesized
caggcaacctccacggatcc

SEQ ID NO: 47377 - DNA, 20 bp, Artificial Sequence
  chemically synthesized
cacggatcctggccccatgc

SEQ ID NO: 47378 - DNA, 20 bp, Artificial Sequence
  chemically synthesized
acggatcctggccccatgca

SEQ ID NO: 47379 - DNA, 20 bp, Artificial Sequence
  chemically synthesized
ggatcctggccccatgcaag

SEQ ID NO: 47380 - DNA, 20 bp, Artificial Sequence
  chemically synthesized
gatcctggccccatgcaagg

SEQ ID NO: 47381 - DNA, 20 bp, Artificial Sequence
  chemically synthesized
caaggaggaacatgatgaca

SEQ ID NO: 47382 - DNA, 20 bp, Artificial Sequence
  chemically synthesized
ggaggaacatgatgacatgg

SEQ ID NO: 47383 - DNA, 20 bp, Artificial Sequence
  chemically synthesized
atgatgacatggaagaaacc

SEQ ID NO: 47384 - DNA, 20 bp, Artificial Sequence
  chemically synthesized
ggaagaaacccagcaaaccc

SEQ ID NO: 47385 - DNA, 20 bp, Artificial Sequence
  chemically synthesized
gaagaaacccagcaaaccct

SEQ ID NO: 47386 - DNA, 20 bp, Artificial Sequence
  chemically synthesized
ctacttacaaattacaacaa

SEQ ID NO: 47387 - DNA, 20 bp, Artificial Sequence
  chemically synthesized
acttacaaattacaacaaaa

SEQ ID NO: 47388 - DNA, 20 bp, Artificial Sequence
  chemically synthesized
ttacaacaaaagagacacaa

SEQ ID NO: 47389 - DNA, 20 bp, Artificial Sequence
  chemically synthesized
acaacaaaagagacacaaca

SEQ ID NO: 47390 - DNA, 20 bp, Artificial Sequence
  chemically synthesized
aaaagagacacaacagagta

SEQ ID NO: 47391 - DNA, 20 bp, Artificial Sequence
  chemically synthesized
agagacacaacagagtatag

SEQ ID NO: 47392 - DNA, 20 bp, Artificial Sequence
  chemically synthesized
acagagtatagtagatgata

SEQ ID NO: 47393 - DNA, 20 bp, Artificial Sequence
  chemically synthesized
gagtatagtagatgataaag

SEQ ID NO: 47394 - DNA, 20 bp, Artificial Sequence
  chemically synthesized
gataaagaagttaccaaatg

SEQ ID NO: 47395 - DNA, 20 bp, Artificial Sequence
  chemically synthesized
gttaccaaatgcggaccaaa

SEQ ID NO: 47396 - DNA, 20 bp, Artificial Sequence
  chemically synthesized
gcggaccaaaaagcaaatta

SEQ ID NO: 47397 - DNA, 20 bp, Artificial Sequence
  chemically synthesized
agcaaattaaagaactcata

SEQ ID NO: 47398 - DNA, 20 bp, Artificial Sequence
  chemically synthesized
gcaaattaaagaactcatat

SEQ ID NO: 47399 - DNA, 20 bp, Artificial Sequence
  chemically synthesized
gccaactattattattcaca

SEQ ID NO: 47400 - DNA, 20 bp, Artificial Sequence
  chemically synthesized
acactttcaaatgtgccatt

SEQ ID NO: 47401 - DNA, 20 bp, Artificial Sequence
  chemically synthesized
cactttcaaatgtgccattc

SEQ ID NO: 47402 - DNA, 20 bp, Artificial Sequence
  chemically synthesized
atgtgccattcaggcaaaaa

SEQ ID NO: 47403 - DNA, 20 bp, Artificial Sequence
  chemically synthesized
tgtgccattcaggcaaaaat

SEQ ID NO: 47404 - DNA, 20 bp, Artificial Sequence
  chemically synthesized
tcaggcaaaaatgggaacta

SEQ ID NO: 47405 - DNA, 20 bp, Artificial Sequence
  chemically synthesized
caggcaaaaatgggaactac

SEQ ID NO: 47406 - DNA, 20 bp, Artificial Sequence
  chemically synthesized
ctacgggccacactcgacaa

SEQ ID NO: 47407 - DNA, 20 bp, Artificial Sequence
  chemically synthesized
tacgggccacactcgacaac

SEQ ID NO: 47408 - DNA, 20 bp, Artificial Sequence
  chemically synthesized
ttttcctctgtacctgcacc

SEQ ID NO: 47409 - DNA, 20 bp, Artificial Sequence
  chemically synthesized
tacctgcacccagctctcta

SEQ ID NO: 47410 - DNA, 20 bp, Artificial Sequence
  chemically synthesized
acctgcacccagctctctac

SEQ ID NO: 47411 - DNA, 20 bp, Artificial Sequence
  chemically synthesized
cacccagctctctacgggcc

SEQ ID NO: 47412 - DNA, 20 bp, Artificial Sequence
  chemically synthesized
tctacgggcctggtcgctcc

SEQ ID NO: 47413 - DNA, 20 bp, Artificial Sequence
  chemically synthesized
acgggcctggtcgctcctgg

SEQ ID NO: 47414 - DNA, 20 bp, Artificial Sequence
  chemically synthesized
gctcctggtggccctgccca

SEQ ID NO: 47415 - DNA, 20 bp, Artificial Sequence
  chemically synthesized
ctcctggtggccctgcccaa

SEQ ID NO: 47416 - DNA, 20 bp, Artificial Sequence
  chemically synthesized
ccaccccctcccccatgccc

SEQ ID NO: 47417 - DNA, 20 bp, Artificial Sequence
  chemically synthesized
cccctcccccatgccccagt

SEQ ID NO: 47418 - DNA, 20 bp, Artificial Sequence
  chemically synthesized
tgccccagtcagaataaatt

SEQ ID NO: 47419 - DNA, 20 bp, Artificial Sequence
  chemically synthesized
gccccagtcagaataaattg

SEQ ID NO: 47420 - DNA, 20 bp, Artificial Sequence
  chemically synthesized
ccccagtcagaataaattga

SEQ ID NO: 47421 - DNA, 20 bp, Artificial Sequence
  chemically synthesized
taaattgagggaaaaaatca

SEQ ID NO: 47422 - DNA, 20 bp, Artificial Sequence
  chemically synthesized
aaattgagggaaaaaatcat

SEQ ID NO: 47423 - DNA, 20 bp, Artificial Sequence
  chemically synthesized
agggaaaaaatcatgggctt

SEQ ID NO: 47424 - DNA, 20 bp, Artificial Sequence
  chemically synthesized
ggaaaaaatcatgggctttg

SEQ ID NO: 47425 - DNA, 20 bp, Artificial Sequence
  chemically synthesized
aaaatcatgggctttggagc

SEQ ID NO: 47426 - DNA, 20 bp, Artificial Sequence
  chemically synthesized
aaatcatgggctttggagcc

SEQ ID NO: 47427 - DNA, 20 bp, Artificial Sequence
  chemically synthesized
gctttggagccaggaaaccg

SEQ ID NO: 47428 - DNA, 20 bp, Artificial Sequence
  chemically synthesized
gaaaccgtggacctgaattc

SEQ ID NO: 47429 - DNA, 20 bp, Artificial Sequence
  chemically synthesized
attccagctccaatatttac

SEQ ID NO: 47430 - DNA, 20 bp, Artificial Sequence
  chemically synthesized
tccaatatttactggttgtg

SEQ ID NO: 47431 - DNA, 20 bp, Artificial Sequence
  chemically synthesized
tttactggttgtgcagccat

SEQ ID NO: 47432 - DNA, 20 bp, Artificial Sequence
  chemically synthesized
ctggttgtgcagccatgagc

SEQ ID NO: 47433 - DNA, 20 bp, Artificial Sequence
  chemically synthesized
gagcaagtcactcaacctct

SEQ ID NO: 47434 - DNA, 20 bp, Artificial Sequence
  chemically synthesized
gcaagtcactcaacctctcg

SEQ ID NO: 47435 - DNA, 20 bp, Artificial Sequence
  chemically synthesized
cactcaacctctcggagcct

SEQ ID NO: 47436 - DNA, 20 bp, Artificial Sequence
  chemically synthesized
cagatacctctgctgtattg

SEQ ID NO: 47437 - DNA, 20 bp, Artificial Sequence
  chemically synthesized
gatacctctgctgtattgta

SEQ ID NO: 47438 - DNA, 20 bp, Artificial Sequence
  chemically synthesized
ctgctgtattgtagagacca

SEQ ID NO: 47439 - DNA, 20 bp, Artificial Sequence
  chemically synthesized
agaccacagtacctatgaca

SEQ ID NO: 47440 - DNA, 20 bp, Artificial Sequence
  chemically synthesized
gaccacagtacctatgacat

SEQ ID NO: 47441 - DNA, 20 bp, Artificial Sequence
  chemically synthesized
tacctatgacataggcctgc

SEQ ID NO: 47442 - DNA, 20 bp, Artificial Sequence
  chemically synthesized
acctatgacataggcctgct

SEQ ID NO: 47443 - DNA, 20 bp, Artificial Sequence
  chemically synthesized
atgacataggcctgctggga

SEQ ID NO: 47444 - DNA, 20 bp, Artificial Sequence
  chemically synthesized
ataggcctgctgggaaagtc

SEQ ID NO: 47445 - DNA, 20 bp, Artificial Sequence
  chemically synthesized
aggcctgctgggaaagtcaa

SEQ ID NO: 47446 - DNA, 20 bp, Artificial Sequence
  chemically synthesized
gctgggaaagtcaagagtga

SEQ ID NO: 47447 - DNA, 20 bp, Artificial Sequence
  chemically synthesized
ggttatataaatctcccatc

SEQ ID NO: 47448 - DNA, 20 bp, Artificial Sequence
  chemically synthesized
atccagatgctctacaaatg

SEQ ID NO: 47449 - DNA, 20 bp, Artificial Sequence
  chemically synthesized
tccagatgctctacaaatgc

SEQ ID NO: 47450 - DNA, 20 bp, Artificial Sequence
  chemically synthesized
agatgctctacaaatgcagg

SEQ ID NO: 47451 - DNA, 20 bp, Artificial Sequence
  chemically synthesized
tgctctacaaatgcaggcag

SEQ ID NO: 47452 - DNA, 20 bp, Artificial Sequence
  chemically synthesized
gctctacaaatgcaggcaga

SEQ ID NO: 47453 - DNA, 20 bp, Artificial Sequence
  chemically synthesized
ctctacaaatgcaggcagaa

SEQ ID NO: 47454 - DNA, 20 bp, Artificial Sequence
  chemically synthesized
tgcaggcagaagggatgact

SEQ ID NO: 47455 - DNA, 20 bp, Artificial Sequence
  chemically synthesized
ggcagaagggatgactaagt

SEQ ID NO: 47456 - DNA, 20 bp, Artificial Sequence
  chemically synthesized
aagggatgactaagtgagca

SEQ ID NO: 47457 - DNA, 20 bp, Artificial Sequence
  chemically synthesized
agggatgactaagtgagcaa

SEQ ID NO: 47458 - DNA, 20 bp, Artificial Sequence
  chemically synthesized
agcaaaggcaacacttctta

SEQ ID NO: 47459 - DNA, 20 bp, Artificial Sequence
  chemically synthesized
caaaggcaacacttcttaaa

SEQ ID NO: 47460 - DNA, 20 bp, Artificial Sequence
  chemically synthesized
aaggcaacacttcttaaaga

SEQ ID NO: 47461 - DNA, 20 bp, Artificial Sequence
  chemically synthesized
ggcaacacttcttaaagaga

SEQ ID NO: 47462 - DNA, 20 bp, Artificial Sequence
  chemically synthesized
cacttcttaaagagagagaa

SEQ ID NO: 47463 - DNA, 20 bp, Artificial Sequence
  chemically synthesized
cttaaagagagagaaaagtc

SEQ ID NO: 47464 - DNA, 20 bp, Artificial Sequence
  chemically synthesized
ttaaagagagagaaaagtca

SEQ ID NO: 47465 - DNA, 20 bp, Artificial Sequence
  chemically synthesized
aaaagtcaaggccactgtct

SEQ ID NO: 47466 - DNA, 20 bp, Artificial Sequence
  chemically synthesized
tccttttgtgttgctatata

SEQ ID NO: 47467 - DNA, 20 bp, Artificial Sequence
  chemically synthesized
ccttttgtgttgctatataa

SEQ ID NO: 47468 - DNA, 20 bp, Artificial Sequence
  chemically synthesized
gctatataaaggaatacctg

SEQ ID NO: 47469 - DNA, 20 bp, Artificial Sequence
  chemically synthesized
ctatataaaggaatacctga

SEQ ID NO: 47470 - DNA, 20 bp, Artificial Sequence
  chemically synthesized
ataaaggaatacctgaaggt

SEQ ID NO: 47471 - DNA, 20 bp, Artificial Sequence
  chemically synthesized
cctgaaggtgagtaatttac

SEQ ID NO: 47472 - DNA, 20 bp, Artificial Sequence
  chemically synthesized
ctgaaggtgagtaatttaca

SEQ ID NO: 47473 - DNA, 20 bp, Artificial Sequence
  chemically synthesized
ggtgagtaatttacaaggaa

SEQ ID NO: 47474 - DNA, 20 bp, Artificial Sequence
  chemically synthesized
gtgagtaatttacaaggaaa

SEQ ID NO: 47475 - DNA, 20 bp, Artificial Sequence
  chemically synthesized
tgagtaatttacaaggaaaa

SEQ ID NO: 47476 - DNA, 20 bp, Artificial Sequence
  chemically synthesized
acaaggaaaagggatttatt

SEQ ID NO: 47477 - DNA, 20 bp, Artificial Sequence
  chemically synthesized
tattcagctcatgattctgc

SEQ ID NO: 47478 - DNA, 20 bp, Artificial Sequence
  chemically synthesized
tcatgattctgcaagctctc

SEQ ID NO: 47479 - DNA, 20 bp, Artificial Sequence
  chemically synthesized
catgattctgcaagctctcc

SEQ ID NO: 47480 - DNA, 20 bp, Artificial Sequence
  chemically synthesized
gattctgcaagctctccagg

SEQ ID NO: 47481 - DNA, 20 bp, Artificial Sequence
  chemically synthesized
tgcaagctctccaggaagca

SEQ ID NO: 47482 - DNA, 20 bp, Artificial Sequence
  chemically synthesized
ctctccaggaagcatggcac

SEQ ID NO: 47483 - DNA, 20 bp, Artificial Sequence
  chemically synthesized
atggcaccagcatctgcttc

SEQ ID NO: 47484 - DNA, 20 bp, Artificial Sequence
  chemically synthesized
caccagcatctgcttctggt

SEQ ID NO: 47485 - DNA, 20 bp, Artificial Sequence
  chemically synthesized
accagcatctgcttctggtg

SEQ ID NO: 47486 - DNA, 20 bp, Artificial Sequence
  chemically synthesized
ccagcatctgcttctggtga

SEQ ID NO: 47487 - DNA, 20 bp, Artificial Sequence
  chemically synthesized
ctgcttctggtgagggcctt

SEQ ID NO: 47488 - DNA, 20 bp, Artificial Sequence
  chemically synthesized
ccttaagctgctttcactga

SEQ ID NO: 47489 - DNA, 20 bp, Artificial Sequence
  chemically synthesized
taagctgctttcactgatgg

SEQ ID NO: 47490 - DNA, 20 bp, Artificial Sequence
  chemically synthesized
gctgctttcactgatggcag

SEQ ID NO: 47491 - DNA, 20 bp, Artificial Sequence
  chemically synthesized
ctgctttcactgatggcaga

SEQ ID NO: 47492 - DNA, 20 bp, Artificial Sequence
  chemically synthesized
ttcactgatggcagaaggtg

SEQ ID NO: 47493 - DNA, 20 bp, Artificial Sequence
  chemically synthesized
tcactgatggcagaaggtga

SEQ ID NO: 47494 - DNA, 20 bp, Artificial Sequence
  chemically synthesized
cactgatggcagaaggtgaa

SEQ ID NO: 47495 - DNA, 20 bp, Artificial Sequence
  chemically synthesized
actgatggcagaaggtgaag

SEQ ID NO: 47496 - DNA, 20 bp, Artificial Sequence
  chemically synthesized
tgatggcagaaggtgaaggg

SEQ ID NO: 47497 - DNA, 20 bp, Artificial Sequence
  chemically synthesized
tgaaggggagcctacatgtg

SEQ ID NO: 47498 - DNA, 20 bp, Artificial Sequence
  chemically synthesized
aaggggagcctacatgtgca

SEQ ID NO: 47499 - DNA, 20 bp, Artificial Sequence
  chemically synthesized
atgtgcagagatcaatcaca

SEQ ID NO: 47500 - DNA, 20 bp, Artificial Sequence
  chemically synthesized
gcagagatcaatcacatggc

SEQ ID NO: 47501 - DNA, 20 bp, Artificial Sequence
  chemically synthesized
agagatcaatcacatggcaa

SEQ ID NO: 47502 - DNA, 20 bp, Artificial Sequence
  chemically synthesized
gatcaatcacatggcaagag

SEQ ID NO: 47503 - DNA, 20 bp, Artificial Sequence
  chemically synthesized
caatcacatggcaagagaag

SEQ ID NO: 47504 - DNA, 20 bp, Artificial Sequence
  chemically synthesized
cacatggcaagagaagaagc

SEQ ID NO: 47505 - DNA, 20 bp, Artificial Sequence
  chemically synthesized
catggcaagagaagaagcaa

SEQ ID NO: 47506 - DNA, 20 bp, Artificial Sequence
  chemically synthesized
tggcaagagaagaagcaaga

SEQ ID NO: 47507 - DNA, 20 bp, Artificial Sequence
  chemically synthesized
caagagaagaagcaagagag

SEQ ID NO: 47508 - DNA, 20 bp, Artificial Sequence
  chemically synthesized
agagaagaagcaagagagaa

SEQ ID NO: 47509 - DNA, 20 bp, Artificial Sequence
  chemically synthesized
agaagaagcaagagagaaga

SEQ ID NO: 47510 - DNA, 20 bp, Artificial Sequence
  chemically synthesized
gaagaagcaagagagaagag

SEQ ID NO: 47511 - DNA, 20 bp, Artificial Sequence
  chemically synthesized
aagaagcaagagagaagaga

SEQ ID NO: 47512 - DNA, 20 bp, Artificial Sequence
  chemically synthesized
gaagcaagagagaagagagg

SEQ ID NO: 47513 - DNA, 20 bp, Artificial Sequence
  chemically synthesized
aagcaagagagaagagaggg

SEQ ID NO: 47514 - DNA, 20 bp, Artificial Sequence
  chemically synthesized
agagaagagagggaggtgcc

SEQ ID NO: 47515 - DNA, 20 bp, Artificial Sequence
  chemically synthesized
gccaagctctttttaataat

SEQ ID NO: 47516 - DNA, 20 bp, Artificial Sequence
  chemically synthesized
ctttttaataatcagccttc

SEQ ID NO: 47517 - DNA, 20 bp, Artificial Sequence
  chemically synthesized
tttttaataatcagccttca

SEQ ID NO: 47518 - DNA, 20 bp, Artificial Sequence
  chemically synthesized
ttttaataatcagccttcaa

SEQ ID NO: 47519 - DNA, 20 bp, Artificial Sequence
  chemically synthesized
tcagccttcaagggaaatca

SEQ ID NO: 47520 - DNA, 20 bp, Artificial Sequence
  chemically synthesized
gccttcaagggaaatcatag

SEQ ID NO: 47521 - DNA, 20 bp, Artificial Sequence
  chemically synthesized
ccttcaagggaaatcatagc

SEQ ID NO: 47522 - DNA, 20 bp, Artificial Sequence
  chemically synthesized
ttcaagggaaatcatagcgg

SEQ ID NO: 47523 - DNA, 20 bp, Artificial Sequence
  chemically synthesized
gagaacttactcattatcac

SEQ ID NO: 47524 - DNA, 20 bp, Artificial Sequence
  chemically synthesized
agaacttactcattatcaca

SEQ ID NO: 47525 - DNA, 20 bp, Artificial Sequence
  chemically synthesized
cttactcattatcacaagga

SEQ ID NO: 47526 - DNA, 20 bp, Artificial Sequence
  chemically synthesized
attatcacaaggacggcacc

SEQ ID NO: 47527 - DNA, 20 bp, Artificial Sequence
  chemically synthesized
ggacggcaccaagcctttca

SEQ ID NO: 47528 - DNA, 20 bp, Artificial Sequence
  chemically synthesized
gacggcaccaagcctttcac

SEQ ID NO: 47529 - DNA, 20 bp, Artificial Sequence
  chemically synthesized
acggcaccaagcctttcaca

SEQ ID NO: 47530 - DNA, 20 bp, Artificial Sequence
  chemically synthesized
cggcaccaagcctttcacag

SEQ ID NO: 47531 - DNA, 20 bp, Artificial Sequence
  chemically synthesized
atgacccaaacacctcccat

SEQ ID NO: 47532 - DNA, 20 bp, Artificial Sequence
  chemically synthesized
tgacccaaacacctcccatt

SEQ ID NO: 47533 - DNA, 20 bp, Artificial Sequence
  chemically synthesized
taggccccacttccaacact

SEQ ID NO: 47534 - DNA, 20 bp, Artificial Sequence
  chemically synthesized
aggccccacttccaacactg

SEQ ID NO: 47535 - DNA, 20 bp, Artificial Sequence
  chemically synthesized
tgaggaccaaatttccacat

SEQ ID NO: 47536 - DNA, 20 bp, Artificial Sequence
  chemically synthesized
ccaaatttccacatgagatt

SEQ ID NO: 47537 - DNA, 20 bp, Artificial Sequence
  chemically synthesized
aaatttccacatgagatttg

SEQ ID NO: 47538 - DNA, 20 bp, Artificial Sequence
  chemically synthesized
aatttccacatgagatttgg

SEQ ID NO: 47539 - DNA, 20 bp, Artificial Sequence
  chemically synthesized
atttccacatgagatttgga

SEQ ID NO: 47540 - DNA, 20 bp, Artificial Sequence
  chemically synthesized
tttccacatgagatttggag

SEQ ID NO: 47541 - DNA, 20 bp, Artificial Sequence
  chemically synthesized
tggaggggacaaacaaatta

SEQ ID NO: 47542 - DNA, 20 bp, Artificial Sequence
  chemically synthesized
aggggacaaacaaattatag

SEQ ID NO: 47543 - DNA, 20 bp, Artificial Sequence
  chemically synthesized
attatagcagccactatcta

SEQ ID NO: 47544 - DNA, 20 bp, Artificial Sequence
  chemically synthesized
actatctatggtgatttgtt

SEQ ID NO: 47545 - DNA, 20 bp, Artificial Sequence
  chemically synthesized
atggtgatttgtttggtttt

SEQ ID NO: 47546 - DNA, 20 bp, Artificial Sequence
  chemically synthesized
ttgtctgctccaactgctct

SEQ ID NO: 47547 - DNA, 20 bp, Artificial Sequence
  chemically synthesized
tgtctgctccaactgctctc

SEQ ID NO: 47548 - DNA, 20 bp, Artificial Sequence
  chemically synthesized
ctgctccaactgctctcagg

SEQ ID NO: 47549 - DNA, 20 bp, Artificial Sequence
  chemically synthesized
tcaggcagacatacctgctt

SEQ ID NO: 47550 - DNA, 20 bp, Artificial Sequence
  chemically synthesized
acctgcttaagaaccttcac

SEQ ID NO: 47551 - DNA, 20 bp, Artificial Sequence
  chemically synthesized
gaaccttcactggctcccca

SEQ ID NO: 47552 - DNA, 20 bp, Artificial Sequence
  chemically synthesized
tccccacagcctcatgaatc

SEQ ID NO: 47553 - DNA, 20 bp, Artificial Sequence
  chemically synthesized
ccaaactccatgctcctcct

SEQ ID NO: 47554 - DNA, 20 bp, Artificial Sequence
  chemically synthesized
ccctacctcaacctaccttg

SEQ ID NO: 47555 - DNA, 20 bp, Artificial Sequence
  chemically synthesized
atctctgtatatatgcatct

SEQ ID NO: 47556 - DNA, 20 bp, Artificial Sequence
  chemically synthesized
tatatatgcatcttggactc

SEQ ID NO: 47557 - DNA, 20 bp, Artificial Sequence
  chemically synthesized
tatgcatcttggactccagt

SEQ ID NO: 47558 - DNA, 20 bp, Artificial Sequence
  chemically synthesized
tgcatcttggactccagtca

SEQ ID NO: 47559 - DNA, 20 bp, Artificial Sequence
  chemically synthesized
atcttggactccagtcagag

SEQ ID NO: 47560 - DNA, 20 bp, Artificial Sequence
  chemically synthesized
ggactccagtcagagtagaa

SEQ ID NO: 47561 - DNA, 20 bp, Artificial Sequence
  chemically synthesized
actccagtcagagtagaaca

SEQ ID NO: 47562 - DNA, 20 bp, Artificial Sequence
  chemically synthesized
gagtccaccccctttaccca

SEQ ID NO: 47563 - DNA, 20 bp, Artificial Sequence
  chemically synthesized
accccctttacccaaagcct

SEQ ID NO: 47564 - DNA, 20 bp, Artificial Sequence
  chemically synthesized
ccccctttacccaaagcctt

SEQ ID NO: 47565 - DNA, 20 bp, Artificial Sequence
  chemically synthesized
cccctttacccaaagcctta

SEQ ID NO: 47566 - DNA, 20 bp, Artificial Sequence
  chemically synthesized
ccaaagccttagggccaaaa

SEQ ID NO: 47567 - DNA, 20 bp, Artificial Sequence
  chemically synthesized
gccaaaacggttttgaacct

SEQ ID NO: 47568 - DNA, 20 bp, Artificial Sequence
  chemically synthesized
tttgaacctcagaacttgtt

SEQ ID NO: 47569 - DNA, 20 bp, Artificial Sequence
  chemically synthesized
ctcagaacttgtttggattt

SEQ ID NO: 47570 - DNA, 20 bp, Artificial Sequence
  chemically synthesized
gaacttgtttggattttaga

SEQ ID NO: 47571 - DNA, 20 bp, Artificial Sequence
  chemically synthesized
aacttgtttggattttagaa

SEQ ID NO: 47572 - DNA, 20 bp, Artificial Sequence
  chemically synthesized
ttgtttggattttagaaagg

SEQ ID NO: 47573 - DNA, 20 bp, Artificial Sequence
  chemically synthesized
ggattttagaaaggcagtaa

SEQ ID NO: 47574 - DNA, 20 bp, Artificial Sequence
  chemically synthesized
gattttagaaaggcagtaat

SEQ ID NO: 47575 - DNA, 20 bp, Artificial Sequence
  chemically synthesized
gaaaggcagtaatgggcaat

SEQ ID NO: 47576 - DNA, 20 bp, Artificial Sequence
  chemically synthesized
aaggcagtaatgggcaatca

SEQ ID NO: 47577 - DNA, 20 bp, Artificial Sequence
  chemically synthesized
atgggcaatcagagtctgct

SEQ ID NO: 47578 - DNA, 20 bp, Artificial Sequence
  chemically synthesized
ggcaatcagagtctgcttgg

SEQ ID NO: 47579 - DNA, 20 bp, Artificial Sequence
  chemically synthesized
agagtctgcttggaagaatc

SEQ ID NO: 47580 - DNA, 20 bp, Artificial Sequence
  chemically synthesized
agtctgcttggaagaatctg

SEQ ID NO: 47581 - DNA, 20 bp, Artificial Sequence
  chemically synthesized
gctgcatactgtaatctatg

SEQ ID NO: 47582 - DNA, 20 bp, Artificial Sequence
  chemically synthesized
aattaaaaataatctcatgt

SEQ ID NO: 47583 - DNA, 20 bp, Artificial Sequence
  chemically synthesized
aatctcatgtcagttcacgt

SEQ ID NO: 47584 - DNA, 20 bp, Artificial Sequence
  chemically synthesized
atctcatgtcagttcacgtc

SEQ ID NO: 47585 - DNA, 20 bp, Artificial Sequence
  chemically synthesized
taaatcacaaaaaaaacttt

SEQ ID NO: 47586 - DNA, 20 bp, Artificial Sequence
  chemically synthesized
tttcgtaacattttacattt

SEQ ID NO: 47587 - DNA, 20 bp, Artificial Sequence
  chemically synthesized
gtaacattttacatttcaga

SEQ ID NO: 47588 - DNA, 20 bp, Artificial Sequence
  chemically synthesized
acattttacatttcagacgg

SEQ ID NO: 47589 - DNA, 20 bp, Artificial Sequence
  chemically synthesized
tacatttcagacggtggata

SEQ ID NO: 47590 - DNA, 20 bp, Artificial Sequence
  chemically synthesized
agacggtggataaagaactg

SEQ ID NO: 47591 - DNA, 20 bp, Artificial Sequence
  chemically synthesized
acggtggataaagaactgtg

SEQ ID NO: 47592 - DNA, 20 bp, Artificial Sequence
  chemically synthesized
cggtggataaagaactgtgg

SEQ ID NO: 47593 - DNA, 20 bp, Artificial Sequence
  chemically synthesized
ggataaagaactgtggaggc

SEQ ID NO: 47594 - DNA, 20 bp, Artificial Sequence
  chemically synthesized
gataaagaactgtggaggcc

SEQ ID NO: 47595 - DNA, 20 bp, Artificial Sequence
  chemically synthesized
agaactgtggaggccaggcg

SEQ ID NO: 47596 - DNA, 20 bp, Artificial Sequence
  chemically synthesized
actgtggaggccaggcgtgg

SEQ ID NO: 47597 - DNA, 20 bp, Artificial Sequence
  chemically synthesized
gtggctcacacctgtaattc

SEQ ID NO: 47598 - DNA, 20 bp, Artificial Sequence
  chemically synthesized
cacctgtaattcgagcactt

SEQ ID NO: 47599 - DNA, 20 bp, Artificial Sequence
  chemically synthesized
acctgtaattcgagcacttt

SEQ ID NO: 47600 - DNA, 20 bp, Artificial Sequence
  chemically synthesized
ctgtaattcgagcactttgg

SEQ ID NO: 47601 - DNA, 20 bp, Artificial Sequence
  chemically synthesized
tgtaattcgagcactttggg

SEQ ID NO: 47602 - DNA, 20 bp, Artificial Sequence
  chemically synthesized
ttcgagcactttgggaggct

SEQ ID NO: 47603 - DNA, 20 bp, Artificial Sequence
  chemically synthesized
tcgagcactttgggaggctg

SEQ ID NO: 47604 - DNA, 20 bp, Artificial Sequence
  chemically synthesized
agcactttgggaggctgagg

SEQ ID NO: 47605 - DNA, 20 bp, Artificial Sequence
  chemically synthesized
gcactttgggaggctgaggc

SEQ ID NO: 47606 - DNA, 20 bp, Artificial Sequence
  chemically synthesized
actttgggaggctgaggcgg

SEQ ID NO: 47607 - DNA, 20 bp, Artificial Sequence
  chemically synthesized
ctttgggaggctgaggcggg

SEQ ID NO: 47608 - DNA, 20 bp, Artificial Sequence
  chemically synthesized
aggcgggaggatcacctcct

SEQ ID NO: 47609 - DNA, 20 bp, Artificial Sequence
  chemically synthesized
atcacctcctcggatccact

SEQ ID NO: 47610 - DNA, 20 bp, Artificial Sequence
  chemically synthesized
tcacctcctcggatccactg

SEQ ID NO: 47611 - DNA, 20 bp, Artificial Sequence
  chemically synthesized
acctcctcggatccactgag

SEQ ID NO: 47612 - DNA, 20 bp, Artificial Sequence
  chemically synthesized
cctcctcggatccactgagg

SEQ ID NO: 47613 - DNA, 20 bp, Artificial Sequence
  chemically synthesized
ctcggatccactgaggaggt

SEQ ID NO: 47614 - DNA, 20 bp, Artificial Sequence
  chemically synthesized
tcggatccactgaggaggtc

SEQ ID NO: 47615 - DNA, 20 bp, Artificial Sequence
  chemically synthesized
ggatccactgaggaggtcag

SEQ ID NO: 47616 - DNA, 20 bp, Artificial Sequence
  chemically synthesized
ggaggtcaggagtttgcgac

SEQ ID NO: 47617 - DNA, 20 bp, Artificial Sequence
  chemically synthesized
tcaggagtttgcgactagcc

SEQ ID NO: 47618 - DNA, 20 bp, Artificial Sequence
  chemically synthesized
tgcgactagcctggccaacg

SEQ ID NO: 47619 - DNA, 20 bp, Artificial Sequence
  chemically synthesized
tctactaaaaatacaaaaat

SEQ ID NO: 47620 - DNA, 20 bp, Artificial Sequence
  chemically synthesized
ctaaaaatacaaaaattagc

SEQ ID NO: 47621 - DNA, 20 bp, Artificial Sequence
  chemically synthesized
taaaaatacaaaaattagcc

SEQ ID NO: 47622 - DNA, 20 bp, Artificial Sequence
  chemically synthesized
atacaaaaattagccgggcg

SEQ ID NO: 47623 - DNA, 20 bp, Artificial Sequence
  chemically synthesized
caaaaattagccgggcgtgg

SEQ ID NO: 47624 - DNA, 20 bp, Artificial Sequence
  chemically synthesized
aaattagccgggcgtggtgg

SEQ ID NO: 47625 - DNA, 20 bp, Artificial Sequence
  chemically synthesized
aattagccgggcgtggtggc

SEQ ID NO: 47626 - DNA, 20 bp, Artificial Sequence
  chemically synthesized
gtggcaggtacctgtaatcc

SEQ ID NO: 47627 - DNA, 20 bp, Artificial Sequence
  chemically synthesized
tacctgtaatcccagcttct

SEQ ID NO: 47628 - DNA, 20 bp, Artificial Sequence
  chemically synthesized
acctgtaatcccagcttctt

SEQ ID NO: 47629 - DNA, 20 bp, Artificial Sequence
  chemically synthesized
ctgtaatcccagcttcttgg

SEQ ID NO: 47630 - DNA, 20 bp, Artificial Sequence
  chemically synthesized
tgtaatcccagcttcttggg

SEQ ID NO: 47631 - DNA, 20 bp, Artificial Sequence
  chemically synthesized
tcccagcttcttgggaggct

SEQ ID NO: 47632 - DNA, 20 bp, Artificial Sequence
  chemically synthesized
cccagcttcttgggaggctg

SEQ ID NO: 47633 - DNA, 20 bp, Artificial Sequence
  chemically synthesized
agcttcttgggaggctgagg

SEQ ID NO: 47634 - DNA, 20 bp, Artificial Sequence
  chemically synthesized
gcttcttgggaggctgaggc

SEQ ID NO: 47635 - DNA, 20 bp, Artificial Sequence
  chemically synthesized
ttcttgggaggctgaggcag

SEQ ID NO: 47636 - DNA, 20 bp, Artificial Sequence
  chemically synthesized
gcaggagaaccacttgaacc

SEQ ID NO: 47637 - DNA, 20 bp, Artificial Sequence
  chemically synthesized
caggagaaccacttgaaccc

SEQ ID NO: 47638 - DNA, 20 bp, Artificial Sequence
  chemically synthesized
ggagaaccacttgaacccgg

SEQ ID NO: 47639 - DNA, 20 bp, Artificial Sequence
  chemically synthesized
aaccacttgaacccgggaga

SEQ ID NO: 47640 - DNA, 20 bp, Artificial Sequence
  chemically synthesized
aacccgggagacagatgttg

SEQ ID NO: 47641 - DNA, 20 bp, Artificial Sequence
  chemically synthesized
cgggagacagatgttgcagt

SEQ ID NO: 47642 - DNA, 20 bp, Artificial Sequence
  chemically synthesized
gacagatgttgcagtgagct

SEQ ID NO: 47643 - DNA, 20 bp, Artificial Sequence
  chemically synthesized
gagactgcaccattgcactc

SEQ ID NO: 47644 - DNA, 20 bp, Artificial Sequence
  chemically synthesized
tgcaccattgcactccagcc

SEQ ID NO: 47645 - DNA, 20 bp, Artificial Sequence
  chemically synthesized
gcaccattgcactccagcct

SEQ ID NO: 47646 - DNA, 20 bp, Artificial Sequence
  chemically synthesized
tgcactccagcctgggcaac

SEQ ID NO: 47647 - DNA, 20 bp, Artificial Sequence
  chemically synthesized
cactccagcctgggcaacaa

SEQ ID NO: 47648 - DNA, 20 bp, Artificial Sequence
  chemically synthesized
aaactccatctcaaaaaaaa

SEQ ID NO: 47649 - DNA, 20 bp, Artificial Sequence
  chemically synthesized
catctcaaaaaaaaaagaaa

SEQ ID NO: 47650 - DNA, 20 bp, Artificial Sequence
  chemically synthesized
aaaaaaaagaaaaagaactg

SEQ ID NO: 47651 - DNA, 20 bp, Artificial Sequence
  chemically synthesized
tgctccttatcttccacctc

SEQ ID NO: 47652 - DNA, 20 bp, Artificial Sequence
  chemically synthesized
tcttccacctctggttttcc

SEQ ID NO: 47653 - DNA, 20 bp, Artificial Sequence
  chemically synthesized
cagctctgtatctttgttca

SEQ ID NO: 47654 - DNA, 20 bp, Artificial Sequence
  chemically synthesized
ttcatggtacctcctaatcc

SEQ ID NO: 47655 - DNA, 20 bp, Artificial Sequence
  chemically synthesized
gaactcctactaatgcttca

SEQ ID NO: 47656 - DNA, 20 bp, Artificial Sequence
  chemically synthesized
taaataaaaattgaatgaat

SEQ ID NO: 47657 - DNA, 20 bp, Artificial Sequence
  chemically synthesized
aaataaaaattgaatgaatt

SEQ ID NO: 47658 - DNA, 20 bp, Artificial Sequence
  chemically synthesized
ataaaaattgaatgaattgg

SEQ ID NO: 47659 - DNA, 20 bp, Artificial Sequence
  chemically synthesized
aaaaattgaatgaattggga

SEQ ID NO: 47660 - DNA, 20 bp, Artificial Sequence
  chemically synthesized
aattgggagagtactctgtg

SEQ ID NO: 47661 - DNA, 20 bp, Artificial Sequence
  chemically synthesized
tgggagagtactctgtgcag

SEQ ID NO: 47662 - DNA, 20 bp, Artificial Sequence
  chemically synthesized
ggagagtactctgtgcagtg

SEQ ID NO: 47663 - DNA, 20 bp, Artificial Sequence
  chemically synthesized
tactctgtgcagtggagtgt

SEQ ID NO: 47664 - DNA, 20 bp, Artificial Sequence
  chemically synthesized
gtgcagtggagtgtcagttc

SEQ ID NO: 47665 - DNA, 20 bp, Artificial Sequence
  chemically synthesized
gagtgtcagttctggaaacc

SEQ ID NO: 47666 - DNA, 20 bp, Artificial Sequence
  chemically synthesized
aaacccagttctaatgcacc

SEQ ID NO: 47667 - DNA, 20 bp, Artificial Sequence
  chemically synthesized
aacccagttctaatgcacct

SEQ ID NO: 47668 - DNA, 20 bp, Artificial Sequence
  chemically synthesized
acccagttctaatgcacctg

SEQ ID NO: 47669 - DNA, 20 bp, Artificial Sequence
  chemically synthesized
ctggggtgacctcctctctc

SEQ ID NO: 47670 - DNA, 20 bp, Artificial Sequence
  chemically synthesized
tggggtgacctcctctctct

SEQ ID NO: 47671 - DNA, 20 bp, Artificial Sequence
  chemically synthesized
gacctcctctctctgggcct

SEQ ID NO: 47672 - DNA, 20 bp, Artificial Sequence
  chemically synthesized
cctcagtttctcatgactaa

SEQ ID NO: 47673 - DNA, 20 bp, Artificial Sequence
  chemically synthesized
gtttctcatgactaaaagaa

SEQ ID NO: 47674 - DNA, 20 bp, Artificial Sequence
  chemically synthesized
tttctcatgactaaaagaaa

SEQ ID NO: 47675 - DNA, 20 bp, Artificial Sequence
  chemically synthesized
catgactaaaagaaaaggat

SEQ ID NO: 47676 - DNA, 20 bp, Artificial Sequence
  chemically synthesized
atgaatgaataaatgaactt

SEQ ID NO: 47677 - DNA, 20 bp, Artificial Sequence
  chemically synthesized
tgaatgaataaatgaacttg

SEQ ID NO: 47678 - DNA, 20 bp, Artificial Sequence
  chemically synthesized
aatgaataaatgaacttgag

SEQ ID NO: 47679 - DNA, 20 bp, Artificial Sequence
  chemically synthesized
atgaataaatgaacttgagg

SEQ ID NO: 47680 - DNA, 20 bp, Artificial Sequence
  chemically synthesized
ctcctgttccaaacttccac

SEQ ID NO: 47681 - DNA, 20 bp, Artificial Sequence
  chemically synthesized
cctgttccaaacttccacca

SEQ ID NO: 47682 - DNA, 20 bp, Artificial Sequence
  chemically synthesized
gttccaaacttccaccagag

SEQ ID NO: 47683 - DNA, 20 bp, Artificial Sequence
  chemically synthesized
accagagaagaaacatcctc

SEQ ID NO: 47684 - DNA, 20 bp, Artificial Sequence
  chemically synthesized
ccagagaagaaacatcctca

SEQ ID NO: 47685 - DNA, 20 bp, Artificial Sequence
  chemically synthesized
cagagaagaaacatcctcaa

SEQ ID NO: 47686 - DNA, 20 bp, Artificial Sequence
  chemically synthesized
aagaaacatcctcaagggct

SEQ ID NO: 47687 - DNA, 20 bp, Artificial Sequence
  chemically synthesized
acatcctcaagggcttggtt

SEQ ID NO: 47688 - DNA, 20 bp, Artificial Sequence
  chemically synthesized
catcctcaagggcttggttc

SEQ ID NO: 47689 - DNA, 20 bp, Artificial Sequence
  chemically synthesized
cctcaagggcttggttcagg

SEQ ID NO: 47690 - DNA, 20 bp, Artificial Sequence
  chemically synthesized
gcttggttcaggtggtcata

SEQ ID NO: 47691 - DNA, 20 bp, Artificial Sequence
  chemically synthesized
gcctctgcttactcacctct

SEQ ID NO: 47692 - DNA, 20 bp, Artificial Sequence
  chemically synthesized
cctctgcttactcacctctc

SEQ ID NO: 47693 - DNA, 20 bp, Artificial Sequence
  chemically synthesized
tgcttactcacctctcagga

SEQ ID NO: 47694 - DNA, 20 bp, Artificial Sequence
  chemically synthesized
gcttactcacctctcaggat

SEQ ID NO: 47695 - DNA, 20 bp, Artificial Sequence
  chemically synthesized
cttactcacctctcaggatg

SEQ ID NO: 47696 - DNA, 20 bp, Artificial Sequence
  chemically synthesized
gatggggtactcactatttc

SEQ ID NO: 47697 - DNA, 20 bp, Artificial Sequence
  chemically synthesized
ggtactcactatttccagaa

SEQ ID NO: 47698 - DNA, 20 bp, Artificial Sequence
  chemically synthesized
tatttccagaacagttgttt

SEQ ID NO: 47699 - DNA, 20 bp, Artificial Sequence
  chemically synthesized
tttccagaacagttgttttg

SEQ ID NO: 47700 - DNA, 20 bp, Artificial Sequence
  chemically synthesized
ccagaacagttgttttggag

SEQ ID NO: 47701 - DNA, 20 bp, Artificial Sequence
  chemically synthesized
gaacagttgttttggagcag

SEQ ID NO: 47702 - DNA, 20 bp, Artificial Sequence
  chemically synthesized
tgaaatgccctttcttatcc

SEQ ID NO: 47703 - DNA, 20 bp, Artificial Sequence
  chemically synthesized
acaaccccacaacatccctc

SEQ ID NO: 47704 - DNA, 20 bp, Artificial Sequence
  chemically synthesized
ccccacaacatccctcgaga

SEQ ID NO: 47705 - DNA, 20 bp, Artificial Sequence
  chemically synthesized
aacatccctcgagaaagtca

SEQ ID NO: 47706 - DNA, 20 bp, Artificial Sequence
  chemically synthesized
acatccctcgagaaagtcaa

SEQ ID NO: 47707 - DNA, 20 bp, Artificial Sequence
  chemically synthesized
cctcgagaaagtcaaaggct

SEQ ID NO: 47708 - DNA, 20 bp, Artificial Sequence
  chemically synthesized
ctcgagaaagtcaaaggctc

SEQ ID NO: 47709 - DNA, 20 bp, Artificial Sequence
  chemically synthesized
tcgagaaagtcaaaggctca

SEQ ID NO: 47710 - DNA, 20 bp, Artificial Sequence
  chemically synthesized
aagtcaaaggctcagggaac

SEQ ID NO: 47711 - DNA, 20 bp, Artificial Sequence
  chemically synthesized
agtcaaaggctcagggaaca

SEQ ID NO: 47712 - DNA, 20 bp, Artificial Sequence
  chemically synthesized
caaaggctcagggaacaagg

SEQ ID NO: 47713 - DNA, 20 bp, Artificial Sequence
  chemically synthesized
aaggctcagggaacaaggaa

SEQ ID NO: 47714 - DNA, 20 bp, Artificial Sequence
  chemically synthesized
aggctcagggaacaaggaag

SEQ ID NO: 47715 - DNA, 20 bp, Artificial Sequence
  chemically synthesized
ggctcagggaacaaggaaga

SEQ ID NO: 47716 - DNA, 20 bp, Artificial Sequence
  chemically synthesized
acaaggaagagggctatact

SEQ ID NO: 47717 - DNA, 20 bp, Artificial Sequence
  chemically synthesized
gaagagggctatactgagct

SEQ ID NO: 47718 - DNA, 20 bp, Artificial Sequence
  chemically synthesized
agggctatactgagctgagt

SEQ ID NO: 47719 - DNA, 20 bp, Artificial Sequence
  chemically synthesized
gggctatactgagctgagta

SEQ ID NO: 47720 - DNA, 20 bp, Artificial Sequence
  chemically synthesized
ggacttgccatcctgccacc

SEQ ID NO: 47721 - DNA, 20 bp, Artificial Sequence
  chemically synthesized
atcctgccacccagcacact

SEQ ID NO: 47722 - DNA, 20 bp, Artificial Sequence
  chemically synthesized
tgccacccagcacactcaga

SEQ ID NO: 47723 - DNA, 20 bp, Artificial Sequence
  chemically synthesized
cacccagcacactcagacag

SEQ ID NO: 47724 - DNA, 20 bp, Artificial Sequence
  chemically synthesized
agcacactcagacagaagcg

SEQ ID NO: 47725 - DNA, 20 bp, Artificial Sequence
  chemically synthesized
gcacactcagacagaagcgt

SEQ ID NO: 47726 - DNA, 20 bp, Artificial Sequence
  chemically synthesized
cactcagacagaagcgtggg

SEQ ID NO: 47727 - DNA, 20 bp, Artificial Sequence
  chemically synthesized
actcagacagaagcgtgggc

SEQ ID NO: 47728 - DNA, 20 bp, Artificial Sequence
  chemically synthesized
cagacagaagcgtgggcagg

SEQ ID NO: 47729 - DNA, 20 bp, Artificial Sequence
  chemically synthesized
aagcgtgggcaggcagctgt

SEQ ID NO: 47730 - DNA, 20 bp, Artificial Sequence
  chemically synthesized
cgtgggcaggcagctgtgag

SEQ ID NO: 47731 - DNA, 20 bp, Artificial Sequence
  chemically synthesized
gggcaggcagctgtgagtgg

SEQ ID NO: 47732 - DNA, 20 bp, Artificial Sequence
  chemically synthesized
cagaattttcccctctgccc

SEQ ID NO: 47733 - DNA, 20 bp, Artificial Sequence
  chemically synthesized
agaattttcccctctgcccc

SEQ ID NO: 47734 - DNA, 20 bp, Artificial Sequence
  chemically synthesized
aattttcccctctgccccag

SEQ ID NO: 47735 - DNA, 20 bp, Artificial Sequence
  chemically synthesized
cccctctgccccaggagctg

SEQ ID NO: 47736 - DNA, 20 bp, Artificial Sequence
  chemically synthesized
ctgccccaggagctgtggtt

SEQ ID NO: 47737 - DNA, 20 bp, Artificial Sequence
  chemically synthesized
gccccaggagctgtggtttg

SEQ ID NO: 47738 - DNA, 20 bp, Artificial Sequence
  chemically synthesized
aggagctgtggtttggagca

SEQ ID NO: 47739 - DNA, 20 bp, Artificial Sequence
  chemically synthesized
agcaaagacaatgtcaccaa

SEQ ID NO: 47740 - DNA, 20 bp, Artificial Sequence
  chemically synthesized
gcaaagacaatgtcaccaac

SEQ ID NO: 47741 - DNA, 20 bp, Artificial Sequence
  chemically synthesized
gtcaccaacaggtcacactg

SEQ ID NO: 47742 - DNA, 20 bp, Artificial Sequence
  chemically synthesized
ccaacaggtcacactgcaga

SEQ ID NO: 47743 - DNA, 20 bp, Artificial Sequence
  chemically synthesized
caacaggtcacactgcagac

SEQ ID NO: 47744 - DNA, 20 bp, Artificial Sequence
  chemically synthesized
aacaggtcacactgcagaca

SEQ ID NO: 47745 - DNA, 20 bp, Artificial Sequence
  chemically synthesized
gcagacagggacaaaactgc

SEQ ID NO: 47746 - DNA, 20 bp, Artificial Sequence
  chemically synthesized
aaaactgcaagtgatccccc

SEQ ID NO: 47747 - DNA, 20 bp, Artificial Sequence
  chemically synthesized
aaactgcaagtgatcccccc

SEQ ID NO: 47748 - DNA, 20 bp, Artificial Sequence
  chemically synthesized
aactgcaagtgatccccccg

SEQ ID NO: 47749 - DNA, 20 bp, Artificial Sequence
  chemically synthesized
ccccccggggcttgcattgt

SEQ ID NO: 47750 - DNA, 20 bp, Artificial Sequence
  chemically synthesized
ttgcattgtaagttcactca

SEQ ID NO: 47751 - DNA, 20 bp, Artificial Sequence
  chemically synthesized
gtaagttcactcatggtcaa

SEQ ID NO: 47752 - DNA, 20 bp, Artificial Sequence
  chemically synthesized
tctccccatctgctgccact

SEQ ID NO: 47753 - DNA, 20 bp, Artificial Sequence
  chemically synthesized
catctgctgccactgagccg

SEQ ID NO: 47754 - DNA, 20 bp, Artificial Sequence
  chemically synthesized
atctgctgccactgagccgt

SEQ ID NO: 47755 - DNA, 20 bp, Artificial Sequence
  chemically synthesized
tctgctgccactgagccgta

SEQ ID NO: 47756 - DNA, 20 bp, Artificial Sequence
  chemically synthesized
cgattgtcacctccctttta

SEQ ID NO: 47757 - DNA, 20 bp, Artificial Sequence
  chemically synthesized
gtcacctcccttttaaagat

SEQ ID NO: 47758 - DNA, 20 bp, Artificial Sequence
  chemically synthesized
tcacctcccttttaaagatt

SEQ ID NO: 47759 - DNA, 20 bp, Artificial Sequence
  chemically synthesized
cccttttaaagattaggcaa

SEQ ID NO: 47760 - DNA, 20 bp, Artificial Sequence
  chemically synthesized
cttttaaagattaggcaatg

SEQ ID NO: 47761 - DNA, 20 bp, Artificial Sequence
  chemically synthesized
ttttaaagattaggcaatgg

SEQ ID NO: 47762 - DNA, 20 bp, Artificial Sequence
  chemically synthesized
agattaggcaatggaggctc

SEQ ID NO: 47763 - DNA, 20 bp, Artificial Sequence
  chemically synthesized
gattaggcaatggaggctca

SEQ ID NO: 47764 - DNA, 20 bp, Artificial Sequence
  chemically synthesized
ggcaatggaggctcaaggat

SEQ ID NO: 47765 - DNA, 20 bp, Artificial Sequence
  chemically synthesized
tcaaggataagtgacttgtc

SEQ ID NO: 47766 - DNA, 20 bp, Artificial Sequence
  chemically synthesized
aagtgacttgtcaagcacca

SEQ ID NO: 47767 - DNA, 20 bp, Artificial Sequence
  chemically synthesized
gacttgtcaagcaccacagc

SEQ ID NO: 47768 - DNA, 20 bp, Artificial Sequence
  chemically synthesized
tgtcaagcaccacagctagt

SEQ ID NO: 47769 - DNA, 20 bp, Artificial Sequence
  chemically synthesized
tcaagcaccacagctagtga

SEQ ID NO: 47770 - DNA, 20 bp, Artificial Sequence
  chemically synthesized
caagcaccacagctagtgag

SEQ ID NO: 47771 - DNA, 20 bp, Artificial Sequence
  chemically synthesized
gcaccacagctagtgagagg

SEQ ID NO: 47772 - DNA, 20 bp, Artificial Sequence
  chemically synthesized
acagctagtgagaggaagcc

SEQ ID NO: 47773 - DNA, 20 bp, Artificial Sequence
  chemically synthesized
tcaaccccacatctgactcc

SEQ ID NO: 47774 - DNA, 20 bp, Artificial Sequence
  chemically synthesized
ccccacatctgactccaagc

SEQ ID NO: 47775 - DNA, 20 bp, Artificial Sequence
  chemically synthesized
cccacatctgactccaagct

SEQ ID NO: 47776 - DNA, 20 bp, Artificial Sequence
  chemically synthesized
ccacatctgactccaagctg

SEQ ID NO: 47777 - DNA, 20 bp, Artificial Sequence
  chemically synthesized
cacatctgactccaagctgg

SEQ ID NO: 47778 - DNA, 20 bp, Artificial Sequence
  chemically synthesized
tgactccaagctgggggaca

SEQ ID NO: 47779 - DNA, 20 bp, Artificial Sequence
  chemically synthesized
agctgggggacacagaacct

SEQ ID NO: 47780 - DNA, 20 bp, Artificial Sequence
  chemically synthesized
ggggacacagaacctcagcc

SEQ ID NO: 47781 - DNA, 20 bp, Artificial Sequence
  chemically synthesized
acagaacctcagccaagtcc

SEQ ID NO: 47782 - DNA, 20 bp, Artificial Sequence
  chemically synthesized
cagaacctcagccaagtcct

SEQ ID NO: 47783 - DNA, 20 bp, Artificial Sequence
  chemically synthesized
acctcagccaagtcctgggc

SEQ ID NO: 47784 - DNA, 20 bp, Artificial Sequence
  chemically synthesized
agtcctgggctggtaatact

SEQ ID NO: 47785 - DNA, 20 bp, Artificial Sequence
  chemically synthesized
gggctggtaatacttagaaa

SEQ ID NO: 47786 - DNA, 20 bp, Artificial Sequence
  chemically synthesized
tggtaatacttagaaaaagc

SEQ ID NO: 47787 - DNA, 20 bp, Artificial Sequence
  chemically synthesized
taatacttagaaaaagctag

SEQ ID NO: 47788 - DNA, 20 bp, Artificial Sequence
  chemically synthesized
aaaagctagtggtctcgccc

SEQ ID NO: 47789 - DNA, 20 bp, Artificial Sequence
  chemically synthesized
aaagctagtggtctcgcccc

SEQ ID NO: 47790 - DNA, 20 bp, Artificial Sequence
  chemically synthesized
gctagtggtctcgccccggg

SEQ ID NO: 47791 - DNA, 20 bp, Artificial Sequence
  chemically synthesized
agtggtctcgccccgggaag

SEQ ID NO: 47792 - DNA, 20 bp, Artificial Sequence
  chemically synthesized
ccccgggaagaagcttccca

SEQ ID NO: 47793 - DNA, 20 bp, Artificial Sequence
  chemically synthesized
gaagaagcttcccacagcct

SEQ ID NO: 47794 - DNA, 20 bp, Artificial Sequence
  chemically synthesized
aagaagcttcccacagcctg

SEQ ID NO: 47795 - DNA, 20 bp, Artificial Sequence
  chemically synthesized
agaagcttcccacagcctga

SEQ ID NO: 47796 - DNA, 20 bp, Artificial Sequence
  chemically synthesized
gcttcccacagcctgagggc

SEQ ID NO: 47797 - DNA, 20 bp, Artificial Sequence
  chemically synthesized
tcccacagcctgagggccag

SEQ ID NO: 47798 - DNA, 20 bp, Artificial Sequence
  chemically synthesized
acagcctgagggccagaagc

SEQ ID NO: 47799 - DNA, 20 bp, Artificial Sequence
  chemically synthesized
gcctgagggccagaagctgg

SEQ ID NO: 47800 - DNA, 20 bp, Artificial Sequence
  chemically synthesized
ctgagggccagaagctggca

SEQ ID NO: 47801 - DNA, 20 bp, Artificial Sequence
  chemically synthesized
cagaagctggcagagttgtt

SEQ ID NO: 47802 - DNA, 20 bp, Artificial Sequence
  chemically synthesized
gagcaaactcgccccgcaca

SEQ ID NO: 47803 - DNA, 20 bp, Artificial Sequence
  chemically synthesized
aaactcgccccgcacacggt

SEQ ID NO: 47804 - DNA, 20 bp, Artificial Sequence
  chemically synthesized
ctcgccccgcacacggtcgg

SEQ ID NO: 47805 - DNA, 20 bp, Artificial Sequence
  chemically synthesized
ccccgcacacggtcggcaga

SEQ ID NO: 47806 - DNA, 20 bp, Artificial Sequence
  chemically synthesized
gcacacggtcggcagacagc

SEQ ID NO: 47807 - DNA, 20 bp, Artificial Sequence
  chemically synthesized
cacacggtcggcagacagcc

SEQ ID NO: 47808 - DNA, 20 bp, Artificial Sequence
  chemically synthesized
acggtcggcagacagccagg

SEQ ID NO: 47809 - DNA, 20 bp, Artificial Sequence
  chemically synthesized
cggtcggcagacagccaggt

SEQ ID NO: 47810 - DNA, 20 bp, Artificial Sequence
  chemically synthesized
ggcagacagccaggtgggct

SEQ ID NO: 47811 - DNA, 20 bp, Artificial Sequence
  chemically synthesized
gcagacagccaggtgggctg

SEQ ID NO: 47812 - DNA, 20 bp, Artificial Sequence
  chemically synthesized
agccaggtgggctgaggcgc

SEQ ID NO: 47813 - DNA, 20 bp, Artificial Sequence
  chemically synthesized
gccaggtgggctgaggcgcc

SEQ ID NO: 47814 - DNA, 20 bp, Artificial Sequence
  chemically synthesized
gtgggctgaggcgccgggct

SEQ ID NO: 47815 - DNA, 20 bp, Artificial Sequence
  chemically synthesized
tgaggcgccgggctcagctc

SEQ ID NO: 47816 - DNA, 20 bp, Artificial Sequence
  chemically synthesized
gaggcgccgggctcagctcc

SEQ ID NO: 47817 - DNA, 20 bp, Artificial Sequence
  chemically synthesized
aggcgccgggctcagctccg

SEQ ID NO: 47818 - DNA, 20 bp, Artificial Sequence
  chemically synthesized
cgggctcagctccggggtcc

SEQ ID NO: 47819 - DNA, 20 bp, Artificial Sequence
  chemically synthesized
cagctccggggtcccagtac

SEQ ID NO: 47820 - DNA, 20 bp, Artificial Sequence
  chemically synthesized
agctccggggtcccagtacc

SEQ ID NO: 47821 - DNA, 20 bp, Artificial Sequence
  chemically synthesized
agtaccaggcgcaccacctc

SEQ ID NO: 47822 - DNA, 20 bp, Artificial Sequence
  chemically synthesized
aggcgcaccacctccggctc

SEQ ID NO: 47823 - DNA, 20 bp, Artificial Sequence
  chemically synthesized
gcgcaccacctccggctcca

SEQ ID NO: 47824 - DNA, 20 bp, Artificial Sequence
  chemically synthesized
acctccggctccagagcacc

SEQ ID NO: 47825 - DNA, 20 bp, Artificial Sequence
  chemically synthesized
cctccggctccagagcacca

SEQ ID NO: 47826 - DNA, 20 bp, Artificial Sequence
  chemically synthesized
ctccggctccagagcaccaa

SEQ ID NO: 47827 - DNA, 20 bp, Artificial Sequence
  chemically synthesized
ccaagggcccttccctgcct

SEQ ID NO: 47828 - DNA, 20 bp, Artificial Sequence
  chemically synthesized
ccttccctgcctgagtccta

SEQ ID NO: 47829 - DNA, 20 bp, Artificial Sequence
  chemically synthesized
cttccctgcctgagtcctaa

SEQ ID NO: 47830 - DNA, 20 bp, Artificial Sequence
  chemically synthesized
tgagtcctaaaggacgccaa

SEQ ID NO: 47831 - DNA, 20 bp, Artificial Sequence
  chemically synthesized
gagtcctaaaggacgccaat

SEQ ID NO: 47832 - DNA, 20 bp, Artificial Sequence
  chemically synthesized
aaaggacgccaatgggcctc

SEQ ID NO: 47833 - DNA, 20 bp, Artificial Sequence
  chemically synthesized
ccccttctcccctgcccctt

SEQ ID NO: 47834 - DNA, 20 bp, Artificial Sequence
  chemically synthesized
ttctcccctgccccttcagc

SEQ ID NO: 47835 - DNA, 20 bp, Artificial Sequence
  chemically synthesized
cttcagctggttcttttctt

SEQ ID NO: 47836 - DNA, 20 bp, Artificial Sequence
  chemically synthesized
gttcttttcttcggctgaaa

SEQ ID NO: 47837 - DNA, 20 bp, Artificial Sequence
  chemically synthesized
ttttcttcggctgaaacaga

SEQ ID NO: 47838 - DNA, 20 bp, Artificial Sequence
  chemically synthesized
ggctgaaacagatggaatac

SEQ ID NO: 47839 - DNA, 20 bp, Artificial Sequence
  chemically synthesized
ctgaaacagatggaatacta

SEQ ID NO: 47840 - DNA, 20 bp, Artificial Sequence
  chemically synthesized
cagatggaatactagagcat

SEQ ID NO: 47841 - DNA, 20 bp, Artificial Sequence
  chemically synthesized
agcatgagttctgtgtcata

SEQ ID NO: 47842 - DNA, 20 bp, Artificial Sequence
  chemically synthesized
aagaaattgcctcgtgctcc

SEQ ID NO: 47843 - DNA, 20 bp, Artificial Sequence
  chemically synthesized
ttcccaccccgcccctgtct

SEQ ID NO: 47844 - DNA, 20 bp, Artificial Sequence
  chemically synthesized
tcccaccccgcccctgtctc

SEQ ID NO: 47845 - DNA, 20 bp, Artificial Sequence
  chemically synthesized
caccccgcccctgtctcggg

SEQ ID NO: 47846 - DNA, 20 bp, Artificial Sequence
  chemically synthesized
accccgcccctgtctcgggt

SEQ ID NO: 47847 - DNA, 20 bp, Artificial Sequence
  chemically synthesized
ccccgcccctgtctcgggta

SEQ ID NO: 47848 - DNA, 20 bp, Artificial Sequence
  chemically synthesized
ctcgggtagggccttctctc

SEQ ID NO: 47849 - DNA, 20 bp, Artificial Sequence
  chemically synthesized
tcgggtagggccttctctcc

SEQ ID NO: 47850 - DNA, 20 bp, Artificial Sequence
  chemically synthesized
ccatgttttccaaaccaaat

SEQ ID NO: 47851 - DNA, 20 bp, Artificial Sequence
  chemically synthesized
caaatcggaacccactataa

SEQ ID NO: 47852 - DNA, 20 bp, Artificial Sequence
  chemically synthesized
tcggaacccactataatggc

SEQ ID NO: 47853 - DNA, 20 bp, Artificial Sequence
  chemically synthesized
aagcccgctttctctgtgcc

SEQ ID NO: 47854 - DNA, 20 bp, Artificial Sequence
  chemically synthesized
cgctttctctgtgcctggtg

SEQ ID NO: 47855 - DNA, 20 bp, Artificial Sequence
  chemically synthesized
tctgtgcctggtgcagttcc

SEQ ID NO: 47856 - DNA, 20 bp, Artificial Sequence
  chemically synthesized
gtgcagttcccagtacgttc

SEQ ID NO: 47857 - DNA, 20 bp, Artificial Sequence
  chemically synthesized
tgcagttcccagtacgttcc

SEQ ID NO: 47858 - DNA, 20 bp, Artificial Sequence
  chemically synthesized
tccttcacccacctgtgccg

SEQ ID NO: 47859 - DNA, 20 bp, Artificial Sequence
  chemically synthesized
tcacccacctgtgccgcggc

SEQ ID NO: 47860 - DNA, 20 bp, Artificial Sequence
  chemically synthesized
cacccacctgtgccgcggcg

SEQ ID NO: 47861 - DNA, 20 bp, Artificial Sequence
  chemically synthesized
ccacctgtgccgcggcgagg

SEQ ID NO: 47862 - DNA, 20 bp, Artificial Sequence
  chemically synthesized
tgccgcggcgaggcagaaac

SEQ ID NO: 47863 - DNA, 20 bp, Artificial Sequence
  chemically synthesized
gccgcggcgaggcagaaact

SEQ ID NO: 47864 - DNA, 20 bp, Artificial Sequence
  chemically synthesized
gaggcagaaactgggaaatc

SEQ ID NO: 47865 - DNA, 20 bp, Artificial Sequence
  chemically synthesized
aggcagaaactgggaaatct

SEQ ID NO: 47866 - DNA, 20 bp, Artificial Sequence
  chemically synthesized
cagaaactgggaaatctggg

SEQ ID NO: 47867 - DNA, 20 bp, Artificial Sequence
  chemically synthesized
agaaactgggaaatctgggc

SEQ ID NO: 47868 - DNA, 20 bp, Artificial Sequence
  chemically synthesized
gaaatctgggcaggatatcc

SEQ ID NO: 47869 - DNA, 20 bp, Artificial Sequence
  chemically synthesized
atctgggcaggatatcctgg

SEQ ID NO: 47870 - DNA, 20 bp, Artificial Sequence
  chemically synthesized
gtgctctgctcgcccttcct

SEQ ID NO: 47871 - DNA, 20 bp, Artificial Sequence
  chemically synthesized
gctcgcccttcctcggcctc

SEQ ID NO: 47872 - DNA, 20 bp, Artificial Sequence
  chemically synthesized
ctcgcccttcctcggcctcc

SEQ ID NO: 47873 - DNA, 20 bp, Artificial Sequence
  chemically synthesized
ccgcgaaccttcccactgaa

SEQ ID NO: 47874 - DNA, 20 bp, Artificial Sequence
  chemically synthesized
aaccttcccactgaatagcg

SEQ ID NO: 47875 - DNA, 20 bp, Artificial Sequence
  chemically synthesized
aatagcgcagccgcacgccc

SEQ ID NO: 47876 - DNA, 20 bp, Artificial Sequence
  chemically synthesized
gcgcagccgcacgccccagc

SEQ ID NO: 47877 - DNA, 20 bp, Artificial Sequence
  chemically synthesized
cacgccccagcaagtcccca

SEQ ID NO: 47878 - DNA, 20 bp, Artificial Sequence
  chemically synthesized
cgccccagcaagtccccaaa

SEQ ID NO: 47879 - DNA, 20 bp, Artificial Sequence
  chemically synthesized
ccagcaagtccccaaagagc

SEQ ID NO: 47880 - DNA, 20 bp, Artificial Sequence
  chemically synthesized
ctcccccgccgccttgcctg

SEQ ID NO: 47881 - DNA, 20 bp, Artificial Sequence
  chemically synthesized
ccgccttgcctgcagtcccc

SEQ ID NO: 47882 - DNA, 20 bp, Artificial Sequence
  chemically synthesized
gcagtccccaagatcgtgcc

SEQ ID NO: 47883 - DNA, 20 bp, Artificial Sequence
  chemically synthesized
ccccaagatcgtgccaagcg

SEQ ID NO: 47884 - DNA, 20 bp, Artificial Sequence
  chemically synthesized
ccaagatcgtgccaagcgaa

SEQ ID NO: 47885 - DNA, 20 bp, Artificial Sequence
  chemically synthesized
cgtgccaagcgaagagccct

SEQ ID NO: 47886 - DNA, 20 bp, Artificial Sequence
  chemically synthesized
actccacttcctctcttaca

SEQ ID NO: 47887 - DNA, 20 bp, Artificial Sequence
  chemically synthesized
ctccacttcctctcttacat

SEQ ID NO: 47888 - DNA, 20 bp, Artificial Sequence
  chemically synthesized
tccacttcctctcttacatg

SEQ ID NO: 47889 - DNA, 20 bp, Artificial Sequence
  chemically synthesized
ccacttcctctcttacatgg

SEQ ID NO: 47890 - DNA, 20 bp, Artificial Sequence
  chemically synthesized
cacttcctctcttacatggg

SEQ ID NO: 47891 - DNA, 20 bp, Artificial Sequence
  chemically synthesized
ctcttacatggggggaaact

SEQ ID NO: 47892 - DNA, 20 bp, Artificial Sequence
  chemically synthesized
tcttacatggggggaaactg

SEQ ID NO: 47893 - DNA, 20 bp, Artificial Sequence
  chemically synthesized
atggggggaaactgaggccc

SEQ ID NO: 47894 - DNA, 20 bp, Artificial Sequence
  chemically synthesized
ggggggaaactgaggcccga

SEQ ID NO: 47895 - DNA, 20 bp, Artificial Sequence
  chemically synthesized
gggggaaactgaggcccgag

SEQ ID NO: 47896 - DNA, 20 bp, Artificial Sequence
  chemically synthesized
aactgaggcccgagaggaaa

SEQ ID NO: 47897 - DNA, 20 bp, Artificial Sequence
  chemically synthesized
gaaacagcaccgcaccgtcc

SEQ ID NO: 47898 - DNA, 20 bp, Artificial Sequence
  chemically synthesized
gcaccgcaccgtcccggctg

SEQ ID NO: 47899 - DNA, 20 bp, Artificial Sequence
  chemically synthesized
caccgcaccgtcccggctgc

SEQ ID NO: 47900 - DNA, 20 bp, Artificial Sequence
  chemically synthesized
tcccggctgcgggttcgccc

SEQ ID NO: 47901 - DNA, 20 bp, Artificial Sequence
  chemically synthesized
ccatccctacacccgcacct

SEQ ID NO: 47902 - DNA, 20 bp, Artificial Sequence
  chemically synthesized
cctacacccgcaccttggcg

SEQ ID NO: 47903 - DNA, 20 bp, Artificial Sequence
  chemically synthesized
acacccgcaccttggcgcag

SEQ ID NO: 47904 - DNA, 20 bp, Artificial Sequence
  chemically synthesized
cccgcaccttggcgcagcgg

SEQ ID NO: 47905 - DNA, 20 bp, Artificial Sequence
  chemically synthesized
gcaccttggcgcagcggtgg

SEQ ID NO: 47906 - DNA, 20 bp, Artificial Sequence
  chemically synthesized
caccttggcgcagcggtgga

SEQ ID NO: 47907 - DNA, 20 bp, Artificial Sequence
  chemically synthesized
cttggcgcagcggtggaagg

SEQ ID NO: 47908 - DNA, 20 bp, Artificial Sequence
  chemically synthesized
gcagcggtggaaggtggctg

SEQ ID NO: 47909 - DNA, 20 bp, Artificial Sequence
  chemically synthesized
ggtggctgtggttccgtgct

SEQ ID NO: 47910 - DNA, 20 bp, Artificial Sequence
  chemically synthesized
gtggctgtggttccgtgctc

SEQ ID NO: 47911 - DNA, 20 bp, Artificial Sequence
  chemically synthesized
ggttccgtgctcgggtgctt

SEQ ID NO: 47912 - DNA, 20 bp, Artificial Sequence
  chemically synthesized
ccgtgctcgggtgcttcggc

SEQ ID NO: 47913 - DNA, 20 bp, Artificial Sequence
  chemically synthesized
cgtgctcgggtgcttcggcc

SEQ ID NO: 47914 - DNA, 20 bp, Artificial Sequence
  chemically synthesized
ttcggccaggccgtcctcct

SEQ ID NO: 47915 - DNA, 20 bp, Artificial Sequence
  chemically synthesized
ggccgtcctcctcggaacgc

SEQ ID NO: 47916 - DNA, 20 bp, Artificial Sequence
  chemically synthesized
gccgtcctcctcggaacgca

SEQ ID NO: 47917 - DNA, 20 bp, Artificial Sequence
  chemically synthesized
tcctcctcggaacgcaaggc

SEQ ID NO: 47918 - DNA, 20 bp, Artificial Sequence
  chemically synthesized
tcggaacgcaaggctagcac

SEQ ID NO: 47919 - DNA, 20 bp, Artificial Sequence
  chemically synthesized
aggctagcaccagctcctcg

SEQ ID NO: 47920 - DNA, 20 bp, Artificial Sequence
  chemically synthesized
cgtcctcgtcctcctgcgca

SEQ ID NO: 47921 - DNA, 20 bp, Artificial Sequence
  chemically synthesized
gtcctcgtcctcctgcgcac

SEQ ID NO: 47922 - DNA, 20 bp, Artificial Sequence
  chemically synthesized
ctcctgcgcacgggcgcccg

SEQ ID NO: 47923 - DNA, 20 bp, Artificial Sequence
  chemically synthesized
tcctgcgcacgggcgcccgc

SEQ ID NO: 47924 - DNA, 20 bp, Artificial Sequence
  chemically synthesized
gcacgggcgcccgcgggacc

SEQ ID NO: 47925 - DNA, 20 bp, Artificial Sequence
  chemically synthesized
cacgggcgcccgcgggaccc

SEQ ID NO: 47926 - DNA, 20 bp, Artificial Sequence
  chemically synthesized
cgggcgcccgcgggacccag

SEQ ID NO: 47927 - DNA, 20 bp, Artificial Sequence
  chemically synthesized
gcgcccgcgggacccaggag

SEQ ID NO: 47928 - DNA, 20 bp, Artificial Sequence
  chemically synthesized
cccgcgggacccaggagcag

SEQ ID NO: 47929 - DNA, 20 bp, Artificial Sequence
  chemically synthesized
gcgggacccaggagcagcag

SEQ ID NO: 47930 - DNA, 20 bp, Artificial Sequence
  chemically synthesized
ggacccaggagcagcagcag

SEQ ID NO: 47931 - DNA, 20 bp, Artificial Sequence
  chemically synthesized
cccaggagcagcagcagcag

SEQ ID NO: 47932 - DNA, 20 bp, Artificial Sequence
  chemically synthesized
aggagcagcagcagcagcag

SEQ ID NO: 47933 - DNA, 20 bp, Artificial Sequence
  chemically synthesized
agcagcagcagcagcagcag

SEQ ID NO: 47934 - DNA, 20 bp, Artificial Sequence
  chemically synthesized
agcagcagcagcagcagcag

SEQ ID NO: 47935 - DNA, 20 bp, Artificial Sequence
  chemically synthesized
agcagcagcagcagcagtgg

SEQ ID NO: 47936 - DNA, 20 bp, Artificial Sequence
  chemically synthesized
agcagcagcagcagtggcag

SEQ ID NO: 47937 - DNA, 20 bp, Artificial Sequence
  chemically synthesized
gcagcagtggcagcggccac

SEQ ID NO: 47938 - DNA, 20 bp, Artificial Sequence
  chemically synthesized
cagcagtggcagcggccacc

SEQ ID NO: 47939 - DNA, 20 bp, Artificial Sequence
  chemically synthesized
cagcggccaccaggaccgcc

SEQ ID NO: 47940 - DNA, 20 bp, Artificial Sequence
  chemically synthesized
gcggccaccaggaccgcctg

SEQ ID NO: 47941 - DNA, 20 bp, Artificial Sequence
  chemically synthesized
ccaggaccgcctggagctga

SEQ ID NO: 47942 - DNA, 20 bp, Artificial Sequence
  chemically synthesized
ctggagctgacggtgcccat

SEQ ID NO: 47943 - DNA, 20 bp, Artificial Sequence
  chemically synthesized
tggagctgacggtgcccatg

SEQ ID NO: 47944 - DNA, 20 bp, Artificial Sequence
  chemically synthesized
ggagctgacggtgcccatga

SEQ ID NO: 47945 - DNA, 20 bp, Artificial Sequence
  chemically synthesized
ctgacggtgcccatgagggc

SEQ ID NO: 47946 - DNA, 20 bp, Artificial Sequence
  chemically synthesized
tgacggtgcccatgagggcc

SEQ ID NO: 47947 - DNA, 20 bp, Artificial Sequence
  chemically synthesized
gacggtgcccatgagggcca

SEQ ID NO: 47948 - DNA, 20 bp, Artificial Sequence
  chemically synthesized
acggtgcccatgagggccag

SEQ ID NO: 47949 - DNA, 20 bp, Artificial Sequence
  chemically synthesized
ggtgcccatgagggccaggg

SEQ ID NO: 47950 - DNA, 20 bp, Artificial Sequence
  chemically synthesized
tgcccatgagggccagggga

SEQ ID NO: 47951 - DNA, 20 bp, Artificial Sequence
  chemically synthesized
gcccatgagggccaggggag

SEQ ID NO: 47952 - DNA, 20 bp, Artificial Sequence
  chemically synthesized
caggggagaggttgctgtcc

SEQ ID NO: 47953 - DNA, 20 bp, Artificial Sequence
  chemically synthesized
ggagaggttgctgtcctggc

SEQ ID NO: 47954 - DNA, 20 bp, Artificial Sequence
  chemically synthesized
gagaggttgctgtcctggcg

SEQ ID NO: 47955 - DNA, 20 bp, Artificial Sequence
  chemically synthesized
gaggttgctgtcctggcgag

SEQ ID NO: 47956 - DNA, 20 bp, Artificial Sequence
  chemically synthesized
gctgtcctggcgaggagacc

SEQ ID NO: 47957 - DNA, 20 bp, Artificial Sequence
  chemically synthesized
tgtcctggcgaggagaccta

SEQ ID NO: 47958 - DNA, 20 bp, Artificial Sequence
  chemically synthesized
gtcctggcgaggagacctag

SEQ ID NO: 47959 - DNA, 20 bp, Artificial Sequence
  chemically synthesized
ggagacctagaggccgtgcg

SEQ ID NO: 47960 - DNA, 20 bp, Artificial Sequence
  chemically synthesized
aggccgtgcgcggtccacgc

SEQ ID NO: 47961 - DNA, 20 bp, Artificial Sequence
  chemically synthesized
ccgtgcgcggtccacgccgg

SEQ ID NO: 47962 - DNA, 20 bp, Artificial Sequence
  chemically synthesized
gtccacgccggcggcgcctt

SEQ ID NO: 47963 - DNA, 20 bp, Artificial Sequence
  chemically synthesized
cggcggcgccttgagccttg

SEQ ID NO: 47964 - DNA, 20 bp, Artificial Sequence
  chemically synthesized
cggcgccttgagccttgcgg

SEQ ID NO: 47965 - DNA, 20 bp, Artificial Sequence
  chemically synthesized
ggcgccttgagccttgcggt

SEQ ID NO: 47966 - DNA, 20 bp, Artificial Sequence
  chemically synthesized
gcgccttgagccttgcggtg

SEQ ID NO: 47967 - DNA, 20 bp, Artificial Sequence
  chemically synthesized
gccttgagccttgcggtggg

SEQ ID NO: 47968 - DNA, 20 bp, Artificial Sequence
  chemically synthesized
ccttgagccttgcggtgggg

SEQ ID NO: 47969 - DNA, 20 bp, Artificial Sequence
  chemically synthesized
ttgcggtggggaggactgtg

SEQ ID NO: 47970 - DNA, 20 bp, Artificial Sequence
  chemically synthesized
tgcggtggggaggactgtgc

SEQ ID NO: 47971 - DNA, 20 bp, Artificial Sequence
  chemically synthesized
cggtggggaggactgtgcag

SEQ ID NO: 47972 - DNA, 20 bp, Artificial Sequence
  chemically synthesized
ggaggactgtgcaggagctg

SEQ ID NO: 47973 - DNA, 20 bp, Artificial Sequence
  chemically synthesized
actgtgcaggagctgaagtt

SEQ ID NO: 47974 - DNA, 20 bp, Artificial Sequence
  chemically synthesized
ctgtgcaggagctgaagttc

SEQ ID NO: 47975 - DNA, 20 bp, Artificial Sequence
  chemically synthesized
gtgcaggagctgaagttcag

SEQ ID NO: 47976 - DNA, 20 bp, Artificial Sequence
  chemically synthesized
caggagctgaagttcaggag

SEQ ID NO: 47977 - DNA, 20 bp, Artificial Sequence
  chemically synthesized
aggagctgaagttcaggagc

SEQ ID NO: 47978 - DNA, 20 bp, Artificial Sequence
  chemically synthesized
ggagctgaagttcaggagca

SEQ ID NO: 47979 - DNA, 20 bp, Artificial Sequence
  chemically synthesized
gttcaggagcagggcgcgtg

SEQ ID NO: 47980 - DNA, 20 bp, Artificial Sequence
  chemically synthesized
ttcaggagcagggcgcgtga

SEQ ID NO: 47981 - DNA, 20 bp, Artificial Sequence
  chemically synthesized
tcaggagcagggcgcgtgaa

SEQ ID NO: 47982 - DNA, 20 bp, Artificial Sequence
  chemically synthesized
caggagcagggcgcgtgaag

SEQ ID NO: 47983 - DNA, 20 bp, Artificial Sequence
  chemically synthesized
agggcgcgtgaaggggcgcg

SEQ ID NO: 47984 - DNA, 20 bp, Artificial Sequence
  chemically synthesized
tgaaggggcgcgcggaatcc

SEQ ID NO: 47985 - DNA, 20 bp, Artificial Sequence
  chemically synthesized
ggggcgcgcggaatcctggc

SEQ ID NO: 47986 - DNA, 20 bp, Artificial Sequence
  chemically synthesized
gggcgcgcggaatcctggct

SEQ ID NO: 47987 - DNA, 20 bp, Artificial Sequence
  chemically synthesized
gcgcgcggaatcctggctgg

SEQ ID NO: 47988 - DNA, 20 bp, Artificial Sequence
  chemically synthesized
gcggaatcctggctgggagc

SEQ ID NO: 47989 - DNA, 20 bp, Artificial Sequence
  chemically synthesized
cggaatcctggctgggagct

SEQ ID NO: 47990 - DNA, 20 bp, Artificial Sequence
  chemically synthesized
gaatcctggctgggagctgg

SEQ ID NO: 47991 - DNA, 20 bp, Artificial Sequence
  chemically synthesized
gctgctgcaacgacgcgtcc

SEQ ID NO: 47992 - DNA, 20 bp, Artificial Sequence
  chemically synthesized
cgacgcgtcccggcccgccc

SEQ ID NO: 47993 - DNA, 20 bp, Artificial Sequence
  chemically synthesized
gcgtcccggcccgcccgagc

SEQ ID NO: 47994 - DNA, 20 bp, Artificial Sequence
  chemically synthesized
cccgagccagtctcactgcc

SEQ ID NO: 47995 - DNA, 20 bp, Artificial Sequence
  chemically synthesized
cactgcctggctcactcctc

SEQ ID NO: 47996 - DNA, 20 bp, Artificial Sequence
  chemically synthesized
actgcctggctcactcctcc

SEQ ID NO: 47997 - DNA, 20 bp, Artificial Sequence
  chemically synthesized
ctggctcactcctccaggct

SEQ ID NO: 47998 - DNA, 20 bp, Artificial Sequence
  chemically synthesized
ggctcagaccctgaactgaa

SEQ ID NO: 47999 - DNA, 20 bp, Artificial Sequence
  chemically synthesized
tcagaccctgaactgaacgg

SEQ ID NO: 48000 - DNA, 20 bp, Artificial Sequence
  chemically synthesized
cggcgcccgcctgcaaccat

SEQ ID NO: 48001 - DNA, 20 bp, Artificial Sequence
  chemically synthesized
tgagcgcctcgacgtcgctg

SEQ ID NO: 48002 - DNA, 20 bp, Artificial Sequence
  chemically synthesized
acgtcgctgcggaaaccttc

SEQ ID NO: 48003 - DNA, 20 bp, Artificial Sequence
  chemically synthesized
cgtcgctgcggaaaccttct

SEQ ID NO: 48004 - DNA, 20 bp, Artificial Sequence
  chemically synthesized
gtcgctgcggaaaccttcta

SEQ ID NO: 48005 - DNA, 20 bp, Artificial Sequence
  chemically synthesized
tgcggaaaccttctagggtg

SEQ ID NO: 48006 - DNA, 20 bp, Artificial Sequence
  chemically synthesized
gcggaaaccttctagggtgt

SEQ ID NO: 48007 - DNA, 20 bp, Artificial Sequence
  chemically synthesized
gggtgtgggtgcttgacgcc

SEQ ID NO: 48008 - DNA, 20 bp, Artificial Sequence
  chemically synthesized
ggtgtgggtgcttgacgcct

SEQ ID NO: 48009 - DNA, 20 bp, Artificial Sequence
  chemically synthesized
gtgtgggtgcttgacgcctg

SEQ ID NO: 48010 - DNA, 20 bp, Artificial Sequence
  chemically synthesized
tgcttgacgcctggggcgcg

SEQ ID NO: 48011 - DNA, 20 bp, Artificial Sequence
  chemically synthesized
gggcgcgcagatcacgccac

SEQ ID NO: 48012 - DNA, 20 bp, Artificial Sequence
  chemically synthesized
gcgcgcagatcacgccacca

SEQ ID NO: 48013 - DNA, 20 bp, Artificial Sequence
  chemically synthesized
tcacgccaccagagccccat

SEQ ID NO: 48014 - DNA, 20 bp, Artificial Sequence
  chemically synthesized
cctatctgattaaacattaa

SEQ ID NO: 48015 - DNA, 20 bp, Artificial Sequence
  chemically synthesized
ttaaacattaacggaacccc

SEQ ID NO: 48016 - DNA, 20 bp, Artificial Sequence
  chemically synthesized
cattaacggaacccccggac

SEQ ID NO: 48017 - DNA, 20 bp, Artificial Sequence
  chemically synthesized
ttaacggaacccccggactg

SEQ ID NO: 48018 - DNA, 20 bp, Artificial Sequence
  chemically synthesized
taacggaacccccggactgg

SEQ ID NO: 48019 - DNA, 20 bp, Artificial Sequence
  chemically synthesized
gaacccccggactggaggat

SEQ ID NO: 48020 - DNA, 20 bp, Artificial Sequence
  chemically synthesized
aacccccggactggaggatc

SEQ ID NO: 48021 - DNA, 20 bp, Artificial Sequence
  chemically synthesized
cggactggaggatcaggttt

SEQ ID NO: 48022 - DNA, 20 bp, Artificial Sequence
  chemically synthesized
tcggcctcgccctccccaaa

SEQ ID NO: 48023 - DNA, 20 bp, Artificial Sequence
  chemically synthesized
tcgccctccccaaacagcgt

SEQ ID NO: 48024 - DNA, 20 bp, Artificial Sequence
  chemically synthesized
aaacagcgtcagattacgcg

SEQ ID NO: 48025 - DNA, 20 bp, Artificial Sequence
  chemically synthesized
acagcgtcagattacgcgca

SEQ ID NO: 48026 - DNA, 20 bp, Artificial Sequence
  chemically synthesized
cagcgtcagattacgcgcag

SEQ ID NO: 48027 - DNA, 20 bp, Artificial Sequence
  chemically synthesized
agcgtcagattacgcgcaga

SEQ ID NO: 48028 - DNA, 20 bp, Artificial Sequence
  chemically synthesized
gtcagattacgcgcagaggg

SEQ ID NO: 48029 - DNA, 20 bp, Artificial Sequence
  chemically synthesized
aaaaactcccaaatcctaac

SEQ ID NO: 48030 - DNA, 20 bp, Artificial Sequence
  chemically synthesized
aaaactcccaaatcctaact

SEQ ID NO: 48031 - DNA, 20 bp, Artificial Sequence
  chemically synthesized
ctcccaaatcctaactgggc

SEQ ID NO: 48032 - DNA, 20 bp, Artificial Sequence
  chemically synthesized
ccaaatcctaactgggctgg

SEQ ID NO: 48033 - DNA, 20 bp, Artificial Sequence
  chemically synthesized
caaatcctaactgggctgga

SEQ ID NO: 48034 - DNA, 20 bp, Artificial Sequence
  chemically synthesized
atcctaactgggctggaagg

SEQ ID NO: 48035 - DNA, 20 bp, Artificial Sequence
  chemically synthesized
tcctaactgggctggaaggc

SEQ ID NO: 48036 - DNA, 20 bp, Artificial Sequence
  chemically synthesized
aactgggctggaaggcaggc

SEQ ID NO: 48037 - DNA, 20 bp, Artificial Sequence
  chemically synthesized
tggaaggcaggccggcgccc

SEQ ID NO: 48038 - DNA, 20 bp, Artificial Sequence
  chemically synthesized
ggaaggcaggccggcgccct

SEQ ID NO: 48039 - DNA, 20 bp, Artificial Sequence
  chemically synthesized
gaaggcaggccggcgcccta

SEQ ID NO: 48040 - DNA, 20 bp, Artificial Sequence
  chemically synthesized
aaggcaggccggcgccctag

SEQ ID NO: 48041 - DNA, 20 bp, Artificial Sequence
  chemically synthesized
ctcccgcctctcaccctgcg

SEQ ID NO: 48042 - DNA, 20 bp, Artificial Sequence
  chemically synthesized
tcccgcctctcaccctgcgt

SEQ ID NO: 48043 - DNA, 20 bp, Artificial Sequence
  chemically synthesized
tctcaccctgcgtgggatgc

SEQ ID NO: 48044 - DNA, 20 bp, Artificial Sequence
  chemically synthesized
tgcgtgggatgccagactcc

SEQ ID NO: 48045 - DNA, 20 bp, Artificial Sequence
  chemically synthesized
tgccagactccaagttctgc

SEQ ID NO: 48046 - DNA, 20 bp, Artificial Sequence
  chemically synthesized
gccagactccaagttctgcc

SEQ ID NO: 48047 - DNA, 20 bp, Artificial Sequence
  chemically synthesized
ttctgccgggcccacctttt

SEQ ID NO: 48048 - DNA, 20 bp, Artificial Sequence
  chemically synthesized
cccaccttttcagtgtttcc

SEQ ID NO: 48049 - DNA, 20 bp, Artificial Sequence
  chemically synthesized
ccaccttttcagtgtttcct

SEQ ID NO: 48050 - DNA, 20 bp, Artificial Sequence
  chemically synthesized
ccaccttgtctcctgctgac

SEQ ID NO: 48051 - DNA, 20 bp, Artificial Sequence
  chemically synthesized
cttgtctcctgctgaccagt

SEQ ID NO: 48052 - DNA, 20 bp, Artificial Sequence
  chemically synthesized
cttctgaatcaatcctactg

SEQ ID NO: 48053 - DNA, 20 bp, Artificial Sequence
  chemically synthesized
gcccaccgaattctttccac

SEQ ID NO: 48054 - DNA, 20 bp, Artificial Sequence
  chemically synthesized
tctttccactggccttaacc

SEQ ID NO: 48055 - DNA, 20 bp, Artificial Sequence
  chemically synthesized
ttccactggccttaacctgg

SEQ ID NO: 48056 - DNA, 20 bp, Artificial Sequence
  chemically synthesized
acctggcagccttctaaact

SEQ ID NO: 48057 - DNA, 20 bp, Artificial Sequence
  chemically synthesized
gcagccttctaaacttagcc

SEQ ID NO: 48058 - DNA, 20 bp, Artificial Sequence
  chemically synthesized
aacttagcctggaccccctc

SEQ ID NO: 48059 - DNA, 20 bp, Artificial Sequence
  chemically synthesized
tgcacactgaccttaccaac

SEQ ID NO: 48060 - DNA, 20 bp, Artificial Sequence
  chemically synthesized
taccaactagctgctccttg

SEQ ID NO: 48061 - DNA, 20 bp, Artificial Sequence
  chemically synthesized
ccaactagctgctccttgaa

SEQ ID NO: 48062 - DNA, 20 bp, Artificial Sequence
  chemically synthesized
gattgcttgcttttgatgtc

SEQ ID NO: 48063 - DNA, 20 bp, Artificial Sequence
  chemically synthesized
gtccagcctacatgcatttc

SEQ ID NO: 48064 - DNA, 20 bp, Artificial Sequence
  chemically synthesized
tccagcctacatgcatttca

SEQ ID NO: 48065 - DNA, 20 bp, Artificial Sequence
  chemically synthesized
ccagcctacatgcatttcaa

SEQ ID NO: 48066 - DNA, 20 bp, Artificial Sequence
  chemically synthesized
ttcaagggatttatactaca

SEQ ID NO: 48067 - DNA, 20 bp, Artificial Sequence
  chemically synthesized
ggatttatactacaaagatt

SEQ ID NO: 48068 - DNA, 20 bp, Artificial Sequence
  chemically synthesized
gatttatactacaaagattc

SEQ ID NO: 48069 - DNA, 20 bp, Artificial Sequence
  chemically synthesized
actacaaagattcaggtttt

SEQ ID NO: 48070 - DNA, 20 bp, Artificial Sequence
  chemically synthesized
attcaggttttaagtttgca

SEQ ID NO: 48071 - DNA, 20 bp, Artificial Sequence
  chemically synthesized
aagtttgcaaagacgtcata

SEQ ID NO: 48072 - DNA, 20 bp, Artificial Sequence
  chemically synthesized
agtttgcaaagacgtcatat

SEQ ID NO: 48073 - DNA, 20 bp, Artificial Sequence
  chemically synthesized
agacgtcatataggtacatt

SEQ ID NO: 48074 - DNA, 20 bp, Artificial Sequence
  chemically synthesized
taggtacattcagaattcta

SEQ ID NO: 48075 - DNA, 20 bp, Artificial Sequence
  chemically synthesized
gtacattcagaattctatgg

SEQ ID NO: 48076 - DNA, 20 bp, Artificial Sequence
  chemically synthesized
tacattcagaattctatggt

SEQ ID NO: 48077 - DNA, 20 bp, Artificial Sequence
  chemically synthesized
cagaattctatggtaggcac

SEQ ID NO: 48078 - DNA, 20 bp, Artificial Sequence
  chemically synthesized
ttctatggtaggcacaagct

SEQ ID NO: 48079 - DNA, 20 bp, Artificial Sequence
  chemically synthesized
taggcacaagctcagctttc

SEQ ID NO: 48080 - DNA, 20 bp, Artificial Sequence
  chemically synthesized
gcacaagctcagctttccag

SEQ ID NO: 48081 - DNA, 20 bp, Artificial Sequence
  chemically synthesized
tccagaagattcaatttgca

SEQ ID NO: 48082 - DNA, 20 bp, Artificial Sequence
  chemically synthesized
tccttttacacaccatgttc

SEQ ID NO: 48083 - DNA, 20 bp, Artificial Sequence
  chemically synthesized
accatgttcaagaaatcaac

SEQ ID NO: 48084 - DNA, 20 bp, Artificial Sequence
  chemically synthesized
gttcaagaaatcaactggac

SEQ ID NO: 48085 - DNA, 20 bp, Artificial Sequence
  chemically synthesized
aaatcaactggacaagcatc

SEQ ID NO: 48086 - DNA, 20 bp, Artificial Sequence
  chemically synthesized
agtaaacacctattgtgtac

SEQ ID NO: 48087 - DNA, 20 bp, Artificial Sequence
  chemically synthesized
gtaaacacctattgtgtacc

SEQ ID NO: 48088 - DNA, 20 bp, Artificial Sequence
  chemically synthesized
aacacctattgtgtaccagg

SEQ ID NO: 48089 - DNA, 20 bp, Artificial Sequence
  chemically synthesized
acacctattgtgtaccaggc

SEQ ID NO: 48090 - DNA, 20 bp, Artificial Sequence
  chemically synthesized
acctattgtgtaccaggcag

SEQ ID NO: 48091 - DNA, 20 bp, Artificial Sequence
  chemically synthesized
cctattgtgtaccaggcagg

SEQ ID NO: 48092 - DNA, 20 bp, Artificial Sequence
  chemically synthesized
gtaccaggcaggaggatgaa

SEQ ID NO: 48093 - DNA, 20 bp, Artificial Sequence
  chemically synthesized
taccaggcaggaggatgaaa

SEQ ID NO: 48094 - DNA, 20 bp, Artificial Sequence
  chemically synthesized
accaggcaggaggatgaaaa

SEQ ID NO: 48095 - DNA, 20 bp, Artificial Sequence
  chemically synthesized
ccaggcaggaggatgaaaag

SEQ ID NO: 48096 - DNA, 20 bp, Artificial Sequence
  chemically synthesized
gcaggaggatgaaaagggga

SEQ ID NO: 48097 - DNA, 20 bp, Artificial Sequence
  chemically synthesized
aggaggatgaaaaggggaaa

SEQ ID NO: 48098 - DNA, 20 bp, Artificial Sequence
  chemically synthesized
gaggatgaaaaggggaaaga

SEQ ID NO: 48099 - DNA, 20 bp, Artificial Sequence
  chemically synthesized
aaaaggggaaagagagctcc

SEQ ID NO: 48100 - DNA, 20 bp, Artificial Sequence
  chemically synthesized
ggaaagagagctcctggcct

SEQ ID NO: 48101 - DNA, 20 bp, Artificial Sequence
  chemically synthesized
ctggcctcagattgtacatg

SEQ ID NO: 48102 - DNA, 20 bp, Artificial Sequence
  chemically synthesized
ttgtacatgtggcatgacat

SEQ ID NO: 48103 - DNA, 20 bp, Artificial Sequence
  chemically synthesized
tgtacatgtggcatgacatg

SEQ ID NO: 48104 - DNA, 20 bp, Artificial Sequence
  chemically synthesized
gacatgaggcttgctctttc

SEQ ID NO: 48105 - DNA, 20 bp, Artificial Sequence
  chemically synthesized
atgaggcttgctctttctgg

SEQ ID NO: 48106 - DNA, 20 bp, Artificial Sequence
  chemically synthesized
tgaggcttgctctttctgga

SEQ ID NO: 48107 - DNA, 20 bp, Artificial Sequence
  chemically synthesized
gaggcttgctctttctggaa

SEQ ID NO: 48108 - DNA, 20 bp, Artificial Sequence
  chemically synthesized
tctggaagggctgtcgatac

SEQ ID NO: 48109 - DNA, 20 bp, Artificial Sequence
  chemically synthesized
ctggaagggctgtcgatact

SEQ ID NO: 48110 - DNA, 20 bp, Artificial Sequence
  chemically synthesized
gaagggctgtcgatactggg

SEQ ID NO: 48111 - DNA, 20 bp, Artificial Sequence
  chemically synthesized
gtcgatactgggaagaaaca

SEQ ID NO: 48112 - DNA, 20 bp, Artificial Sequence
  chemically synthesized
tcgatactgggaagaaacaa

SEQ ID NO: 48113 - DNA, 20 bp, Artificial Sequence
  chemically synthesized
gaatttatgatcctcccttg

SEQ ID NO: 48114 - DNA, 20 bp, Artificial Sequence
  chemically synthesized
gatcctcccttgcagatgca

SEQ ID NO: 48115 - DNA, 20 bp, Artificial Sequence
  chemically synthesized
cctcccttgcagatgcacag

SEQ ID NO: 48116 - DNA, 20 bp, Artificial Sequence
  chemically synthesized
gcagatgcacagcagattcc

SEQ ID NO: 48117 - DNA, 20 bp, Artificial Sequence
  chemically synthesized
acagcagattccgagtgaaa

SEQ ID NO: 48118 - DNA, 20 bp, Artificial Sequence
  chemically synthesized
gaaatggcctgctctgaatc

SEQ ID NO: 48119 - DNA, 20 bp, Artificial Sequence
  chemically synthesized
aaatggcctgctctgaatct

SEQ ID NO: 48120 - DNA, 20 bp, Artificial Sequence
  chemically synthesized
cctgctctgaatctaggtgc

SEQ ID NO: 48121 - DNA, 20 bp, Artificial Sequence
  chemically synthesized
tgctctgaatctaggtgctg

SEQ ID NO: 48122 - DNA, 20 bp, Artificial Sequence
  chemically synthesized
aatctaggtgctggagtcca

SEQ ID NO: 48123 - DNA, 20 bp, Artificial Sequence
  chemically synthesized
ctctttccactttgtttgca

SEQ ID NO: 48124 - DNA, 20 bp, Artificial Sequence
  chemically synthesized
tgtttgcaaagacctcactc

SEQ ID NO: 48125 - DNA, 20 bp, Artificial Sequence
  chemically synthesized
tttgcaaagacctcactcca

SEQ ID NO: 48126 - DNA, 20 bp, Artificial Sequence
  chemically synthesized
tgcaaagacctcactccaga

SEQ ID NO: 48127 - DNA, 20 bp, Artificial Sequence
  chemically synthesized
aagacctcactccagagagc

SEQ ID NO: 48128 - DNA, 20 bp, Artificial Sequence
  chemically synthesized
ctccagagagccagtgcaca

SEQ ID NO: 48129 - DNA, 20 bp, Artificial Sequence
  chemically synthesized
agagagccagtgcacaaaga

SEQ ID NO: 48130 - DNA, 20 bp, Artificial Sequence
  chemically synthesized
gtgcacaaagacagtgcaac

SEQ ID NO: 48131 - DNA, 20 bp, Artificial Sequence
  chemically synthesized
cacaaagacagtgcaaccag

SEQ ID NO: 48132 - DNA, 20 bp, Artificial Sequence
  chemically synthesized
acaaagacagtgcaaccagt

SEQ ID NO: 48133 - DNA, 20 bp, Artificial Sequence
  chemically synthesized
cagtgcaaccagtgggttga

SEQ ID NO: 48134 - DNA, 20 bp, Artificial Sequence
  chemically synthesized
tgggttgacagtgactccat

SEQ ID NO: 48135 - DNA, 20 bp, Artificial Sequence
  chemically synthesized
gggttgacagtgactccatg

SEQ ID NO: 48136 - DNA, 20 bp, Artificial Sequence
  chemically synthesized
tgacagtgactccatgaggt

SEQ ID NO: 48137 - DNA, 20 bp, Artificial Sequence
  chemically synthesized
gacagtgactccatgaggta

SEQ ID NO: 48138 - DNA, 20 bp, Artificial Sequence
  chemically synthesized
gtgactccatgaggtaaggt

SEQ ID NO: 48139 - DNA, 20 bp, Artificial Sequence
  chemically synthesized
gactccatgaggtaaggtca

SEQ ID NO: 48140 - DNA, 20 bp, Artificial Sequence
  chemically synthesized
aggtcagagttatccccatc

SEQ ID NO: 48141 - DNA, 20 bp, Artificial Sequence
  chemically synthesized
ccccatcgagcccgccatcg

SEQ ID NO: 48142 - DNA, 20 bp, Artificial Sequence
  chemically synthesized
tcgagcccgccatcgcagca

SEQ ID NO: 48143 - DNA, 20 bp, Artificial Sequence
  chemically synthesized
gagcccgccatcgcagcaca

SEQ ID NO: 48144 - DNA, 20 bp, Artificial Sequence
  chemically synthesized
cccgccatcgcagcacagag

SEQ ID NO: 48145 - DNA, 20 bp, Artificial Sequence
  chemically synthesized
ccgccatcgcagcacagagt

SEQ ID NO: 48146 - DNA, 20 bp, Artificial Sequence
  chemically synthesized
gccatcgcagcacagagtag

SEQ ID NO: 48147 - DNA, 20 bp, Artificial Sequence
  chemically synthesized
cagcacagagtaggagctca

SEQ ID NO: 48148 - DNA, 20 bp, Artificial Sequence
  chemically synthesized
aggagctcatggtttgctga

SEQ ID NO: 48149 - DNA, 20 bp, Artificial Sequence
  chemically synthesized
gagctcatggtttgctgaca

SEQ ID NO: 48150 - DNA, 20 bp, Artificial Sequence
  chemically synthesized
agctcatggtttgctgacag

SEQ ID NO: 48151 - DNA, 20 bp, Artificial Sequence
  chemically synthesized
tcatggtttgctgacagagg

SEQ ID NO: 48152 - DNA, 20 bp, Artificial Sequence
  chemically synthesized
tggtttgctgacagaggtgg

SEQ ID NO: 48153 - DNA, 20 bp, Artificial Sequence
  chemically synthesized
gtttgctgacagaggtggca

SEQ ID NO: 48154 - DNA, 20 bp, Artificial Sequence
  chemically synthesized
tttgctgacagaggtggcag

SEQ ID NO: 48155 - DNA, 20 bp, Artificial Sequence
  chemically synthesized
gctgacagaggtggcagagg

SEQ ID NO: 48156 - DNA, 20 bp, Artificial Sequence
  chemically synthesized
tccttcctgttgcctgtaat

SEQ ID NO: 48157 - DNA, 20 bp, Artificial Sequence
  chemically synthesized
ttgtatttgcaatgtgcttt

SEQ ID NO: 48158 - DNA, 20 bp, Artificial Sequence
  chemically synthesized
tatttgcaatgtgcttttgg

SEQ ID NO: 48159 - DNA, 20 bp, Artificial Sequence
  chemically synthesized
ttttggcagcttcctcatca

SEQ ID NO: 48160 - DNA, 20 bp, Artificial Sequence
  chemically synthesized
tttggcagcttcctcatcaa

SEQ ID NO: 48161 - DNA, 20 bp, Artificial Sequence
  chemically synthesized
tcctcatcaaaggcctcccc

SEQ ID NO: 48162 - DNA, 20 bp, Artificial Sequence
  chemically synthesized
ctcatcaaaggcctcccctg

SEQ ID NO: 48163 - DNA, 20 bp, Artificial Sequence
  chemically synthesized
tcaaaggcctcccctggagc

SEQ ID NO: 48164 - DNA, 20 bp, Artificial Sequence
  chemically synthesized
ggcctcccctggagcaagaa

SEQ ID NO: 48165 - DNA, 20 bp, Artificial Sequence
  chemically synthesized
tcccctggagcaagaataga

SEQ ID NO: 48166 - DNA, 20 bp, Artificial Sequence
  chemically synthesized
cccctggagcaagaatagat

SEQ ID NO: 48167 - DNA, 20 bp, Artificial Sequence
  chemically synthesized
cctggagcaagaatagatgg

SEQ ID NO: 48168 - DNA, 20 bp, Artificial Sequence
  chemically synthesized
ctttccctgctgctcccctt

SEQ ID NO: 48169 - DNA, 20 bp, Artificial Sequence
  chemically synthesized
tttccctgctgctccccttt

SEQ ID NO: 48170 - DNA, 20 bp, Artificial Sequence
  chemically synthesized
gctgctcccctttgggacct

SEQ ID NO: 48171 - DNA, 20 bp, Artificial Sequence
  chemically synthesized
gaccttggcctctcacctac

SEQ ID NO: 48172 - DNA, 20 bp, Artificial Sequence
  chemically synthesized
accttggcctctcacctacc

SEQ ID NO: 48173 - DNA, 20 bp, Artificial Sequence
  chemically synthesized
ccttggcctctcacctaccg

SEQ ID NO: 48174 - DNA, 20 bp, Artificial Sequence
  chemically synthesized
gctgcgatggcgggctcgat

SEQ ID NO: 48175 - DNA, 20 bp, Artificial Sequence
  chemically synthesized
ataactctgaccttacctca

SEQ ID NO: 48176 - DNA, 20 bp, Artificial Sequence
  chemically synthesized
gtctttgtgcactggctctc

SEQ ID NO: 48177 - DNA, 20 bp, Artificial Sequence
  chemically synthesized
tcagagcaggccatttcact

SEQ ID NO: 48178 - DNA, 20 bp, Artificial Sequence
  chemically synthesized
tctgctgtgcatctgcaagg

SEQ ID NO: 48179 - DNA, 20 bp, Artificial Sequence
  chemically synthesized
tggtacacaataggtgttta

SEQ ID NO: 48180 - DNA, 20 bp, Artificial Sequence
  chemically synthesized
tcttgaacatggtgtgtaaa

SEQ ID NO: 48181 - DNA, 20 bp, Artificial Sequence
  chemically synthesized
gtaaaaggaatctttgcaaa

SEQ ID NO: 48182 - DNA, 20 bp, Artificial Sequence
  chemically synthesized
agctgagcttgtgcctacca

SEQ ID NO: 48183 - DNA, 20 bp, Artificial Sequence
  chemically synthesized
cttgtgcctaccatagaatt

SEQ ID NO: 48184 - DNA, 20 bp, Artificial Sequence
  chemically synthesized
cgtctttgcaaacttaaaac

SEQ ID NO: 48185 - DNA, 20 bp, Artificial Sequence
  chemically synthesized
tagttggtaaggtcagtgtg

SEQ ID NO: 48186 - DNA, 20 bp, Artificial Sequence
  chemically synthesized
cataaagggcagaggccgga

SEQ ID NO: 48187 - DNA, 20 bp, Artificial Sequence
  chemically synthesized
gccaggttaaggccagtgga

SEQ ID NO: 48188 - DNA, 20 bp, Artificial Sequence
  chemically synthesized
aaagaattcggtgggcagcg

SEQ ID NO: 48189 - DNA, 20 bp, Artificial Sequence
  chemically synthesized
gggcagcgaggagtccacag

SEQ ID NO: 48190 - DNA, 20 bp, Artificial Sequence
  chemically synthesized
aaggtgggcccggcagaact

SEQ ID NO: 48191 - DNA, 20 bp, Artificial Sequence
  chemically synthesized
ttggagtctggcatcccacg

SEQ ID NO: 48192 - DNA, 20 bp, Artificial Sequence
  chemically synthesized
ggcctgccttccagcccagt

SEQ ID NO: 48193 - DNA, 20 bp, Artificial Sequence
  chemically synthesized
ttccagcccagttaggattt

SEQ ID NO: 48194 - DNA, 20 bp, Artificial Sequence
  chemically synthesized
gaaacctgatcctccagtcc

SEQ ID NO: 48195 - DNA, 20 bp, Artificial Sequence
  chemically synthesized
tccgttaatgtttaatcaga

SEQ ID NO: 48196 - DNA, 20 bp, Artificial Sequence
  chemically synthesized
gcgggcgccgccgttcagtt

SEQ ID NO: 48197 - DNA, 20 bp, Artificial Sequence
  chemically synthesized
agttcagggtctgagcctgg

SEQ ID NO: 48198 - DNA, 20 bp, Artificial Sequence
  chemically synthesized
agcggctcccagctcccagc

SEQ ID NO: 48199 - DNA, 20 bp, Artificial Sequence
  chemically synthesized
tgctgctgctgctgctgctc

SEQ ID NO: 48200 - DNA, 20 bp, Artificial Sequence
  chemically synthesized
ttccaccgctgcgccaaggt

SEQ ID NO: 48201 - DNA, 20 bp, Artificial Sequence
  chemically synthesized
ctgcgccaaggtgcgggtgt

SEQ ID NO: 48202 - DNA, 20 bp, Artificial Sequence
  chemically synthesized
cccccatgtaagagaggaag

SEQ ID NO: 48203 - DNA, 20 bp, Artificial Sequence
  chemically synthesized
aggcaaggcggcgggggagg

SEQ ID NO: 48204 - DNA, 20 bp, Artificial Sequence
  chemically synthesized
ctattcagtgggaaggttcg

SEQ ID NO: 48205 - DNA, 20 bp, Artificial Sequence
  chemically synthesized
aagggcgagcagagcactgc

SEQ ID NO: 48206 - DNA, 20 bp, Artificial Sequence
  chemically synthesized
tctgcctcgccgcggcacag

SEQ ID NO: 48207 - DNA, 20 bp, Artificial Sequence
  chemically synthesized
gccgcggcacaggtgggtga

SEQ ID NO: 48208 - DNA, 20 bp, Artificial Sequence
  chemically synthesized
cggcacaggtgggtgaagga

SEQ ID NO: 48209 - DNA, 20 bp, Artificial Sequence
  chemically synthesized
aaagcgggcttgccattata

SEQ ID NO: 48210 - DNA, 20 bp, Artificial Sequence
  chemically synthesized
tttggaaaacatgggcagcg

SEQ ID NO: 48211 - DNA, 20 bp, Artificial Sequence
  chemically synthesized
ggccctacccgagacagggg

SEQ ID NO: 48212 - DNA, 20 bp, Artificial Sequence
  chemically synthesized
gtctgccgaccgtgtgcggg

SEQ ID NO: 48213 - DNA, 20 bp, Artificial Sequence
  chemically synthesized
aggttctgtgtcccccagct

SEQ ID NO: 48214 - DNA, 20 bp, Artificial Sequence
  chemically synthesized
ccccagcttggagtcagatg

SEQ ID NO: 48215 - DNA, 20 bp, Artificial Sequence
  chemically synthesized
gcttggagtcagatgtgggg

SEQ ID NO: 48216 - DNA, 20 bp, Artificial Sequence
  chemically synthesized
aagggaaagttctgttgacc

SEQ ID NO: 48217 - DNA, 20 bp, Artificial Sequence
  chemically synthesized
acttacaatgcaagccccgg

SEQ ID NO: 48218 - DNA, 20 bp, Artificial Sequence
  chemically synthesized
ctgcctgcccacgcttctgt

SEQ ID NO: 48219 - DNA, 20 bp, Artificial Sequence
  chemically synthesized
cacgcttctgtctgagtgtg

SEQ ID NO: 48220 - DNA, 20 bp, Artificial Sequence
  chemically synthesized
tgtctgagtgtgctgggtgg

SEQ ID NO: 48221 - DNA, 20 bp, Artificial Sequence
  chemically synthesized
ctgagcctttgactttctcg

SEQ ID NO: 48222 - DNA, 20 bp, Artificial Sequence
  chemically synthesized
gactttctcgagggatgttg

SEQ ID NO: 48223 - DNA, 20 bp, Artificial Sequence
  chemically synthesized
ggatgttgtggggttgtggc

SEQ ID NO: 48224 - DNA, 20 bp, Artificial Sequence
  chemically synthesized
aaacaactgttctggaaata

SEQ ID NO: 48225 - DNA, 20 bp, Artificial Sequence
  chemically synthesized
tgagtaccccatcctgagag

SEQ ID NO: 48226 - DNA, 20 bp, Artificial Sequence
  chemically synthesized
accacctgaaccaagccctt

SEQ ID NO: 48227 - DNA, 20 bp, Artificial Sequence
  chemically synthesized
tcattcaatggttattttgt

SEQ ID NO: 48228 - DNA, 20 bp, Artificial Sequence
  chemically synthesized
caatggttattttgtgggaa

SEQ ID NO: 48229 - DNA, 20 bp, Artificial Sequence
  chemically synthesized
tattttgtgggaatcgaatt

SEQ ID NO: 48230 - DNA, 20 bp, Artificial Sequence
  chemically synthesized
tcaccccaggtgcattagaa

SEQ ID NO: 48231 - DNA, 20 bp, Artificial Sequence
  chemically synthesized
agaactgacactccactgca

SEQ ID NO: 48232 - DNA, 20 bp, Artificial Sequence
  chemically synthesized
ttagcggaaggcattttcag

SEQ ID NO: 48233 - DNA, 20 bp, Artificial Sequence
  chemically synthesized
tgggtctttgaagcattagt

SEQ ID NO: 48234 - DNA, 20 bp, Artificial Sequence
  chemically synthesized
ttcagcgatgatggtgtcat

SEQ ID NO: 48235 - DNA, 20 bp, Artificial Sequence
  chemically synthesized
gtgtcatgagaattttattc

SEQ ID NO: 48236 - DNA, 20 bp, Artificial Sequence
  chemically synthesized
tttttcttttttttttgaga

SEQ ID NO: 48237 - DNA, 20 bp, Artificial Sequence
  chemically synthesized
ttcgctcttgttgcccaggc

SEQ ID NO: 48238 - DNA, 20 bp, Artificial Sequence
  chemically synthesized
ctcactgcaacatctgtctc

SEQ ID NO: 48239 - DNA, 20 bp, Artificial Sequence
  chemically synthesized
gcctcagcctcccaagaagc

SEQ ID NO: 48240 - DNA, 20 bp, Artificial Sequence
  chemically synthesized
ttttgtatttttagtagaga

SEQ ID NO: 48241 - DNA, 20 bp, Artificial Sequence
  chemically synthesized
gcaaactcctgacctcctca

SEQ ID NO: 48242 - DNA, 20 bp, Artificial Sequence
  chemically synthesized
gcctcagcctcccaaagtgc

SEQ ID NO: 48243 - DNA, 20 bp, Artificial Sequence
  chemically synthesized
attatttttaatttagttgt

SEQ ID NO: 48244 - DNA, 20 bp, Artificial Sequence
  chemically synthesized
accgttttggccctaaggct

SEQ ID NO: 48245 - DNA, 20 bp, Artificial Sequence
  chemically synthesized
gccctaaggctttgggtaaa

SEQ ID NO: 48246 - DNA, 20 bp, Artificial Sequence
  chemically synthesized
ggactctgttctactctgac

SEQ ID NO: 48247 - DNA, 20 bp, Artificial Sequence
  chemically synthesized
agatgcatatatacagagat

SEQ ID NO: 48248 - DNA, 20 bp, Artificial Sequence
  chemically synthesized
gtaggggccaaggaggagca

SEQ ID NO: 48249 - DNA, 20 bp, Artificial Sequence
  chemically synthesized
tggggcctaatgggaggtgt

SEQ ID NO: 48250 - DNA, 20 bp, Artificial Sequence
  chemically synthesized
ttggtgccgtccttgtgata

SEQ ID NO: 48251 - DNA, 20 bp, Artificial Sequence
  chemically synthesized
catgcttcctggagagcttg

SEQ ID NO: 48252 - DNA, 20 bp, Artificial Sequence
  chemically synthesized
agagcttgcagaatcatgag

SEQ ID NO: 48253 - DNA, 20 bp, Artificial Sequence
  chemically synthesized
tgcctgcatttgtagagcat

SEQ ID NO: 48254 - DNA, 20 bp, Artificial Sequence
  chemically synthesized
gtatctgaggctccgagagg

SEQ ID NO: 48255 - DNA, 20 bp, Artificial Sequence
  chemically synthesized
caaccagtaaatattggagc

SEQ ID NO: 48256 - DNA, 20 bp, Artificial Sequence
  chemically synthesized
tctgactggggcatggggga

SEQ ID NO: 48257 - DNA, 20 bp, Artificial Sequence
  chemically synthesized
gcgaccaggcccgtagagag

SEQ ID NO: 48258 - DNA, 20 bp, Artificial Sequence
  chemically synthesized
gtacagaggaaaacctgttg

SEQ ID NO: 48259 - DNA, 20 bp, Artificial Sequence
  chemically synthesized
cccgtagttcccatttttgc

SEQ ID NO: 48260 - DNA, 20 bp, Artificial Sequence
  chemically synthesized
tgaaagtgttatataaccat

SEQ ID NO: 48261 - DNA, 20 bp, Artificial Sequence
  chemically synthesized
aataataatagttggcctat

SEQ ID NO: 48262 - DNA, 20 bp, Artificial Sequence
  chemically synthesized
ttttgttgtaatttgtaagt

SEQ ID NO: 48263 - DNA, 20 bp, Artificial Sequence
  chemically synthesized
ggggtgagataaagtacacc

SEQ ID NO: 48264 - DNA, 20 bp, Artificial Sequence
  chemically synthesized
taaagtacacctagggtttg

SEQ ID NO: 48265 - DNA, 20 bp, Artificial Sequence
  chemically synthesized
tgttcctccttgcatggggc

SEQ ID NO: 48266 - DNA, 20 bp, Artificial Sequence
  chemically synthesized
gcaggcccaggctgcccgcc

SEQ ID NO: 48267 - DNA, 20 bp, Artificial Sequence
  chemically synthesized
ttcctggcttcctggtgaag

SEQ ID NO: 48268 - DNA, 20 bp, Artificial Sequence
  chemically synthesized
gctggtgagccacccttttt

SEQ ID NO: 48269 - DNA, 20 bp, Artificial Sequence
  chemically synthesized
aagtatgtattgagcactta

SEQ ID NO: 48270 - DNA, 20 bp, Artificial Sequence
  chemically synthesized
gtaactactggctttctgta

SEQ ID NO: 48271 - DNA, 20 bp, Artificial Sequence
  chemically synthesized
aggggaccacacagacagct

SEQ ID NO: 48272 - DNA, 20 bp, Artificial Sequence
  chemically synthesized
cagacagctaggggtagagc

SEQ ID NO: 48273 - DNA, 20 bp, Artificial Sequence
  chemically synthesized
aacctgtagggacaaggccc

SEQ ID NO: 48274 - DNA, 20 bp, Artificial Sequence
  chemically synthesized
cctgggatgttcagtggagc

SEQ ID NO: 48275 - DNA, 20 bp, Artificial Sequence
  chemically synthesized
tttataaaaaagcatgactc

SEQ ID NO: 48276 - DNA, 20 bp, Artificial Sequence
  chemically synthesized
cctttgaagctgttgctatc

SEQ ID NO: 48277 - DNA, 20 bp, Artificial Sequence
  chemically synthesized
gtgaagtcccttctttagga

SEQ ID NO: 48278 - DNA, 20 bp, Artificial Sequence
  chemically synthesized
cagggtggccctcctccctc

SEQ ID NO: 48279 - DNA, 20 bp, Artificial Sequence
  chemically synthesized
gtggaggggcagaaagggga

SEQ ID NO: 48280 - DNA, 20 bp, Artificial Sequence
  chemically synthesized
aagatttgaagcactagggc

SEQ ID NO: 48281 - DNA, 20 bp, Artificial Sequence
  chemically synthesized
agcactagggccagggtgag

SEQ ID NO: 48282 - DNA, 20 bp, Artificial Sequence
  chemically synthesized
cctaaagaagggacttcact

SEQ ID NO: 48283 - DNA, 20 bp, Artificial Sequence
  chemically synthesized
ctggatagcaacagcttcaa

SEQ ID NO: 48284 - DNA, 20 bp, Artificial Sequence
  chemically synthesized
ttcaaaggaattttggaccc

SEQ ID NO: 48285 - DNA, 20 bp, Artificial Sequence
  chemically synthesized
ggcagcagatgcattggcac

SEQ ID NO: 48286 - DNA, 20 bp, Artificial Sequence
  chemically synthesized
aatggctggcaggcagacca

SEQ ID NO: 48287 - DNA, 20 bp, Artificial Sequence
  chemically synthesized
ggggcatggccaggcttaaa

SEQ ID NO: 48288 - DNA, 20 bp, Artificial Sequence
  chemically synthesized
caggaagtgccattcccaaa

SEQ ID NO: 48289 - DNA, 20 bp, Artificial Sequence
  chemically synthesized
agaaggccatggaagacatg

SEQ ID NO: 48290 - DNA, 20 bp, Artificial Sequence
  chemically synthesized
gtgcgctctgactgcgagag

SEQ ID NO: 48291 - DNA, 20 bp, Artificial Sequence
  chemically synthesized
gtaggtgccaggcaacctcc

SEQ ID NO: 48292 - DNA, 20 bp, Artificial Sequence
  chemically synthesized
ttacaacaaaagagacacaa

SEQ ID NO: 48293 - DNA, 20 bp, Artificial Sequence
  chemically synthesized
cccctcccccatgccccagt

SEQ ID NO: 48294 - DNA, 20 bp, Artificial Sequence
  chemically synthesized
ggagccaggaaaccgtggac

SEQ ID NO: 48295 - DNA, 20 bp, Artificial Sequence
  chemically synthesized
ataggcctgctgggaaagtc

SEQ ID NO: 48296 - DNA, 20 bp, Artificial Sequence
  chemically synthesized
gctctacaaatgcaggcaga

SEQ ID NO: 48297 - DNA, 20 bp, Artificial Sequence
  chemically synthesized
ccttttgtgttgctatataa

SEQ ID NO: 48298 - DNA, 20 bp, Artificial Sequence
  chemically synthesized
atataaaggaatacctgaag

SEQ ID NO: 48299 - DNA, 20 bp, Artificial Sequence
  chemically synthesized
gtgagtaatttacaaggaaa

SEQ ID NO: 48300 - DNA, 20 bp, Artificial Sequence
  chemically synthesized
gacggcaccaagcctttcac

SEQ ID NO: 48301 - DNA, 20 bp, Artificial Sequence
  chemically synthesized
cactggctccccacagcctc

SEQ ID NO: 48302 - DNA, 20 bp, Artificial Sequence
  chemically synthesized
tatgcatcttggactccagt

SEQ ID NO: 48303 - DNA, 20 bp, Artificial Sequence
  chemically synthesized
ggactccagtcagagtagaa

SEQ ID NO: 48304 - DNA, 20 bp, Artificial Sequence
  chemically synthesized
ttttgaacctcagaacttgt

SEQ ID NO: 48305 - DNA, 20 bp, Artificial Sequence
  chemically synthesized
gaaaggcagtaatgggcaat

SEQ ID NO: 48306 - DNA, 20 bp, Artificial Sequence
  chemically synthesized
ggcaatcagagtctgcttgg

SEQ ID NO: 48307 - DNA, 20 bp, Artificial Sequence
  chemically synthesized
taatctatgcagcaaaatat

SEQ ID NO: 48308 - DNA, 20 bp, Artificial Sequence
  chemically synthesized
aacattttacatttcagacg

SEQ ID NO: 48309 - DNA, 20 bp, Artificial Sequence
  chemically synthesized
actttgggaggctgaggcgg

SEQ ID NO: 48310 - DNA, 20 bp, Artificial Sequence
  chemically synthesized
gaggcgggaggatcacctcc

SEQ ID NO: 48311 - DNA, 20 bp, Artificial Sequence
  chemically synthesized
tcggatccactgaggaggtc

SEQ ID NO: 48312 - DNA, 20 bp, Artificial Sequence
  chemically synthesized
ttcatggtacctcctaatcc

SEQ ID NO: 48313 - DNA, 20 bp, Artificial Sequence
  chemically synthesized
tgccttccgctaaataaaaa

SEQ ID NO: 48314 - DNA, 20 bp, Artificial Sequence
  chemically synthesized
ttccgctaaataaaaattga

SEQ ID NO: 48315 - DNA, 20 bp, Artificial Sequence
  chemically synthesized
ataaaaattgaatgaattgg

SEQ ID NO: 48316 - DNA, 20 bp, Artificial Sequence
  chemically synthesized
tgggagagtactctgtgcag

SEQ ID NO: 48317 - DNA, 20 bp, Artificial Sequence
  chemically synthesized
aaacccagttctaatgcacc

SEQ ID NO: 48318 - DNA, 20 bp, Artificial Sequence
  chemically synthesized
gtttctcatgactaaaagaa

SEQ ID NO: 48319 - DNA, 20 bp, Artificial Sequence
  chemically synthesized
cgattcccacaaaataacca

SEQ ID NO: 48320 - DNA, 20 bp, Artificial Sequence
  chemically synthesized
tcccacaaaataaccattga

SEQ ID NO: 48321 - DNA, 20 bp, Artificial Sequence
  chemically synthesized
acaaaataaccattgaatga

SEQ ID NO: 48322 - DNA, 20 bp, Artificial Sequence
  chemically synthesized
gcctctgcttactcacctct

SEQ ID NO: 48323 - DNA, 20 bp, Artificial Sequence
  chemically synthesized
tgcttactcacctctcagga

SEQ ID NO: 48324 - DNA, 20 bp, Artificial Sequence
  chemically synthesized
aggaagagggctatactgag

SEQ ID NO: 48325 - DNA, 20 bp, Artificial Sequence
  chemically synthesized
agaagcgtgggcaggcagct

SEQ ID NO: 48326 - DNA, 20 bp, Artificial Sequence
  chemically synthesized
gggcaggcagctgtgagtgg

SEQ ID NO: 48327 - DNA, 20 bp, Artificial Sequence
  chemically synthesized
agattaggcaatggaggctc

SEQ ID NO: 48328 - DNA, 20 bp, Artificial Sequence
  chemically synthesized
gcctgagggccagaagctgg

SEQ ID NO: 48329 - DNA, 20 bp, Artificial Sequence
  chemically synthesized
tgaggcgccgggctcagctc

SEQ ID NO: 48330 - DNA, 20 bp, Artificial Sequence
  chemically synthesized
caccaagggcccttccctgc

SEQ ID NO: 48331 - DNA, 20 bp, Artificial Sequence
  chemically synthesized
aaaggacgccaatgggcctc

SEQ ID NO: 48332 - DNA, 20 bp, Artificial Sequence
  chemically synthesized
ttttcttcggctgaaacaga

SEQ ID NO: 48333 - DNA, 20 bp, Artificial Sequence
  chemically synthesized
aacagatggaatactagagc

SEQ ID NO: 48334 - DNA, 20 bp, Artificial Sequence
  chemically synthesized
cttcccaccccgcccctgtc

SEQ ID NO: 48335 - DNA, 20 bp, Artificial Sequence
  chemically synthesized
cagaaactgggaaatctggg

SEQ ID NO: 48336 - DNA, 20 bp, Artificial Sequence
  chemically synthesized
tgctcgcccttcctcggcct

SEQ ID NO: 48337 - DNA, 20 bp, Artificial Sequence
  chemically synthesized
caaccccgcgaaccttccca

SEQ ID NO: 48338 - DNA, 20 bp, Artificial Sequence
  chemically synthesized
agcaccgcaccgtcccggct

SEQ ID NO: 48339 - DNA, 20 bp, Artificial Sequence
  chemically synthesized
aggtggctgtggttccgtgc

SEQ ID NO: 48340 - DNA, 20 bp, Artificial Sequence
  chemically synthesized
agggcgcgtgaaggggcgcg

SEQ ID NO: 48341 - DNA, 20 bp, Artificial Sequence
  chemically synthesized
acgtcgctgcggaaaccttc

SEQ ID NO: 48342 - DNA, 20 bp, Artificial Sequence
  chemically synthesized
ctgcggaaaccttctagggt

SEQ ID NO: 48343 - DNA, 20 bp, Artificial Sequence
  chemically synthesized
ttaacggaacccccggactg

SEQ ID NO: 48344 - DNA, 20 bp, Artificial Sequence
  chemically synthesized
ctcccgcctctcaccctgcg

SEQ ID NO: 48345 - DNA, 20 bp, Artificial Sequence
  chemically synthesized
gcccaccttttcagtgtttc

SEQ ID NO: 48346 - DNA, 20 bp, Artificial Sequence
  chemically synthesized
cctgctgaccagtgagactt

SEQ ID NO: 48347 - DNA, 20 bp, Artificial Sequence
  chemically synthesized
tgtggactcctcgctgccca

SEQ ID NO: 48348 - DNA, 20 bp, Artificial Sequence
  chemically synthesized
tccagcctacatgcatttca

SEQ ID NO: 48349 - DNA, 20 bp, Artificial Sequence
  chemically synthesized
agacgtcatataggtacatt

SEQ ID NO: 48350 - DNA, 20 bp, Artificial Sequence
  chemically synthesized
acctattgtgtaccaggcag

SEQ ID NO: 48351 - DNA, 20 bp, Artificial Sequence
  chemically synthesized
gatactgggaagaaacaaag

SEQ ID NO: 48352 - DNA, 20 bp, Artificial Sequence
  chemically synthesized
ttgcagatgcacagcagatt

SEQ ID NO: 48353 - DNA, 20 bp, Artificial Sequence
  chemically synthesized
tccgagtgaaatggcctgct

SEQ ID NO: 48354 - DNA, 20 bp, Artificial Sequence
  chemically synthesized
cctgctctgaatctaggtgc

SEQ ID NO: 48355 - DNA, 20 bp, Artificial Sequence
  chemically synthesized
gcacaaagacagtgcaacca

SEQ ID NO: 48356 - DNA, 20 bp, Artificial Sequence
  chemically synthesized
gtgactccatgaggtaaggt

SEQ ID NO: 48357 - DNA, 20 bp, Artificial Sequence
  chemically synthesized
tcgagcccgccatcgcagca

SEQ ID NO: 48358 - DNA, 20 bp, Artificial Sequence
  chemically synthesized
tccttcctgttgcctgtaat

SEQ ID NO: 48359 - DNA, 20 bp, Artificial Sequence
  chemically synthesized
tcaaaggcctcccctggagc

SEQ ID NO: 48360 - DNA, 20 bp, Artificial Sequence
  chemically synthesized
gaccttggcctctcacctac

SEQ ID NO: 48361 - DNA, 20 bp, Artificial Sequence
  chemically synthesized
tcccagtatcgacagccctt

SEQ ID NO: 48362 - DNA, 20 bp, Artificial Sequence
  chemically synthesized
aagctgagcttgtgcctacc

SEQ ID NO: 48363 - DNA, 20 bp, Artificial Sequence
  chemically synthesized
tgccaggttaaggccagtgg

SEQ ID NO: 48364 - DNA, 20 bp, Artificial Sequence
  chemically synthesized
ctgggaactgcaccaggcac

SEQ ID NO: 48365 - DNA, 20 bp, Artificial Sequence
  chemically synthesized
gtattccatctgtttcagcc

SEQ ID NO: 48366 - DNA, 20 bp, Artificial Sequence
  chemically synthesized
ttgtggggttgtggccagga

SEQ ID NO: 48367 - DNA, 20 bp, Artificial Sequence
  chemically synthesized
ttattttgtgggaatcgaat

SEQ ID NO: 48368 - DNA, 20 bp, Artificial Sequence
  chemically synthesized
atgaaaatattttttggcaa

SEQ ID NO: 48369 - DNA, 20 bp, Artificial Sequence
  chemically synthesized
caatccttttcttttagtca

SEQ ID NO: 48370 - DNA, 20 bp, Artificial Sequence
  chemically synthesized
gttcagcgatgatggtgtca

SEQ ID NO: 48371 - DNA, 20 bp, Artificial Sequence
  chemically synthesized
ccatgcttcctggagagctt

SEQ ID NO: 48372 - DNA, 20 bp, Artificial Sequence
  chemically synthesized
agtaactactggctttctgt

SEQ ID NO: 48373 - DNA, 20 bp, Artificial Sequence
  chemically synthesized
gtcacatcttcggtggaggg

SEQ ID NO: 48374 - DNA, 20 bp, Artificial Sequence
  chemically synthesized
aagcactagggccagggtga

SEQ ID NO: 48375 - DNA, 20 bp, Artificial Sequence
  chemically synthesized
aggcagcagatgcattggca

SEQ ID NO: 48376 - DNA, 20 bp, Artificial Sequence
  chemically synthesized
aggcttaaagggaattctat

SEQ ID NO: 48377 - DNA, 20 bp, Artificial Sequence
  chemically synthesized
aggaggaacatgatgacatg

SEQ ID NO: 48378 - DNA, 20 bp, Artificial Sequence
  chemically synthesized
ccccctcccccatgccccag

SEQ ID NO: 48379 - DNA, 20 bp, Artificial Sequence
  chemically synthesized
aggcaacacttcttaaagag

SEQ ID NO: 48380 - DNA, 20 bp, Artificial Sequence
  chemically synthesized
cctcagaacttgtttggatt

SEQ ID NO: 48381 - DNA, 20 bp, Artificial Sequence
  chemically synthesized
gggcaatcagagtctgcttg

SEQ ID NO: 48382 - DNA, 20 bp, Artificial Sequence
  chemically synthesized
gaaactccatctcaaaaaaa

SEQ ID NO: 48383 - DNA, 20 bp, Artificial Sequence
  chemically synthesized
gttcatggtacctcctaatc

SEQ ID NO: 48384 - DNA, 20 bp, Artificial Sequence
  chemically synthesized
gcctcagtttctcatgacta

SEQ ID NO: 48385 - DNA, 20 bp, Artificial Sequence
  chemically synthesized
tgttccaaacttccaccaga

SEQ ID NO: 48386 - DNA, 20 bp, Artificial Sequence
  chemically synthesized
cacaaccccacaacatccct

SEQ ID NO: 48387 - DNA, 20 bp, Artificial Sequence
  chemically synthesized
tgggcaggcagctgtgagtg

SEQ ID NO: 48388 - DNA, 20 bp, Artificial Sequence
  chemically synthesized
aagtcctgggctggtaatac

SEQ ID NO: 48389 - DNA, 20 bp, Artificial Sequence
  chemically synthesized
taaaggacgccaatgggcct

SEQ ID NO: 48390 - DNA, 20 bp, Artificial Sequence
  chemically synthesized
gagcatgagttctgtgtcat

SEQ ID NO: 48391 - DNA, 20 bp, Artificial Sequence
  chemically synthesized
cccacctgtgccgcggcgag

SEQ ID NO: 48392 - DNA, 20 bp, Artificial Sequence
  chemically synthesized
cgtcagattacgcgcagagg

SEQ ID NO: 48393 - DNA, 20 bp, Artificial Sequence
  chemically synthesized
aagacgtcatataggtacat

SEQ ID NO: 48394 - DNA, 20 bp, Artificial Sequence
  chemically synthesized
ttccttttacacaccatgtt

SEQ ID NO: 48395 - DNA, 20 bp, Artificial Sequence
  chemically synthesized
ggaagggctgtcgatactgg

SEQ ID NO: 48396 - DNA, 20 bp, Artificial Sequence
  chemically synthesized
atcaaaggcctcccctggag

SEQ ID NO: 48397 - DNA, 20 bp, Artificial Sequence
  chemically synthesized
atatgacgtctttgcaaact

SEQ ID NO: 48398 - DNA, 20 bp, Artificial Sequence
  chemically synthesized
gtgggttccgatttggtttg

SEQ ID NO: 48399 - DNA, 20 bp, Artificial Sequence
  chemically synthesized
atttcaagttaccactgctc

SEQ ID NO: 48400 - DNA, 20 bp, Artificial Sequence
  chemically synthesized
gaacaaagatacagagctgg

SEQ ID NO: 48401 - DNA, 20 bp, Artificial Sequence
  chemically synthesized
tctgaaatgtaaaatgttac

SEQ ID NO: 48402 - DNA, 20 bp, Artificial Sequence
  chemically synthesized
tccaaacaagttctgaggtt

SEQ ID NO: 48403 - DNA, 20 bp, Artificial Sequence
  chemically synthesized
agttggagcagacaagagct

SEQ ID NO: 48404 - DNA, 20 bp, Artificial Sequence
  chemically synthesized
agctgggtgcaggtacagag

SEQ ID NO: 48405 - DNA, 20 bp, Artificial Sequence
  chemically synthesized
cctagtgcttcaaatcttaa

SEQ ID NO: 48406 - DNA, 20 bp, Artificial Sequence
  chemically synthesized
ggtggtgcagaagcacaaat

SEQ ID NO: 48407 - DNA, 20 bp, Artificial Sequence
  chemically synthesized
tttacccaaagccttagggc

SEQ ID NO: 48408 - DNA, 20 bp, Artificial Sequence
  chemically synthesized
accatcaaataaatcacaaa

SEQ ID NO: 48409 - DNA, 20 bp, Artificial Sequence
  chemically synthesized
ggtcacactgcagacaggga

SEQ ID NO: 48410 - DNA, 20 bp, Artificial Sequence
  chemically synthesized
gattacgcgcagagggaaga

SEQ ID NO: 48411 - DNA, 20 bp, Artificial Sequence
  chemically synthesized
atcaactttggactccagca

SEQ ID NO: 48412 - DNA, 20 bp, Artificial Sequence
  chemically synthesized
agggaggatcataaattcgc

SEQ ID NO: 48413 - DNA, 20 bp, Artificial Sequence
  chemically synthesized
cctcctgcctggtacacaat

SEQ ID NO: 48414 - DNA, 20 bp, Artificial Sequence
  chemically synthesized
gtacacaataggtgtttact

SEQ ID NO: 48415 - DNA, 20 bp, Artificial Sequence
  chemically synthesized
tgtttactggatgcttgtcc

SEQ ID NO: 48416 - DNA, 20 bp, Artificial Sequence
  chemically synthesized
aaattgaatcttctggaaag

SEQ ID NO: 48417 - DNA, 20 bp, Artificial Sequence
  chemically synthesized
gaggccggagggggtccagg

SEQ ID NO: 48418 - DNA, 20 bp, Artificial Sequence
  chemically synthesized
tgggcagcgaggagtccaca

SEQ ID NO: 48419 - DNA, 20 bp, Artificial Sequence
  chemically synthesized
cagcgaggagtccacagtag

SEQ ID NO: 48420 - DNA, 20 bp, Artificial Sequence
  chemically synthesized
cggcctgccttccagcccag

SEQ ID NO: 48421 - DNA, 20 bp, Artificial Sequence
  chemically synthesized
ttccagcccagttaggattt

SEQ ID NO: 48422 - DNA, 20 bp, Artificial Sequence
  chemically synthesized
tccctctgcgcgtaatctga

SEQ ID NO: 48423 - DNA, 20 bp, Artificial Sequence
  chemically synthesized
ctccagtccgggggttccgt

SEQ ID NO: 48424 - DNA, 20 bp, Artificial Sequence
  chemically synthesized
cgtcaagcacccacacccta

SEQ ID NO: 48425 - DNA, 20 bp, Artificial Sequence
  chemically synthesized
cagcggctcccagctcccag

SEQ ID NO: 48426 - DNA, 20 bp, Artificial Sequence
  chemically synthesized
ccgcagccgggacggtgcgg

SEQ ID NO: 48427 - DNA, 20 bp, Artificial Sequence
  chemically synthesized
ggtgctgtttcctctcgggc

SEQ ID NO: 48428 - DNA, 20 bp, Artificial Sequence
  chemically synthesized
agtgcaggtcgccgagggct

SEQ ID NO: 48429 - DNA, 20 bp, Artificial Sequence
  chemically synthesized
agcactgccaggatatcctg

SEQ ID NO: 48430 - DNA, 20 bp, Artificial Sequence
  chemically synthesized
aggatatcctgcccagattt

SEQ ID NO: 48431 - DNA, 20 bp, Artificial Sequence
  chemically synthesized
ctgcaccaggcacagagaaa

SEQ ID NO: 48432 - DNA, 20 bp, Artificial Sequence
  chemically synthesized
gggcttgccattatagtggg

SEQ ID NO: 48433 - DNA, 20 bp, Artificial Sequence
  chemically synthesized
gccattatagtgggttccga

SEQ ID NO: 48434 - DNA, 20 bp, Artificial Sequence
  chemically synthesized
aactcatgctctagtattcc

SEQ ID NO: 48435 - DNA, 20 bp, Artificial Sequence
  chemically synthesized
gtctgccgaccgtgtgcggg

SEQ ID NO: 48436 - DNA, 20 bp, Artificial Sequence
  chemically synthesized
cgagtttgctcaacaactct

SEQ ID NO: 48437 - DNA, 20 bp, Artificial Sequence
  chemically synthesized
cttctggccctcaggctgtg

SEQ ID NO: 48438 - DNA, 20 bp, Artificial Sequence
  chemically synthesized
cttcttcccggggcgagacc

SEQ ID NO: 48439 - DNA, 20 bp, Artificial Sequence
  chemically synthesized
ttggctgaggttctgtgtcc

SEQ ID NO: 48440 - DNA, 20 bp, Artificial Sequence
  chemically synthesized
agtcagatgtggggttgaat

SEQ ID NO: 48441 - DNA, 20 bp, Artificial Sequence
  chemically synthesized
tggcttcctctcactagctg

SEQ ID NO: 48442 - DNA, 20 bp, Artificial Sequence
  chemically synthesized
caagccccggggggatcact

SEQ ID NO: 48443 - DNA, 20 bp, Artificial Sequence
  chemically synthesized
tgccactcacagctgcctgc

SEQ ID NO: 48444 - DNA, 20 bp, Artificial Sequence
  chemically synthesized
cacctgaaccaagcccttga

SEQ ID NO: 48445 - DNA, 20 bp, Artificial Sequence
  chemically synthesized
gaggatgtttcttctctggt

SEQ ID NO: 48446 - DNA, 20 bp, Artificial Sequence
  chemically synthesized
tcaccccaggtgcattagaa

SEQ ID NO: 48447 - DNA, 20 bp, Artificial Sequence
  chemically synthesized
ggtgtcatgagaattttatt

SEQ ID NO: 48448 - DNA, 20 bp, Artificial Sequence
  chemically synthesized
tttttcttttttttttgaga

SEQ ID NO: 48449 - DNA, 20 bp, Artificial Sequence
  chemically synthesized
tgcctcagcctcccaagaag

SEQ ID NO: 48450 - DNA, 20 bp, Artificial Sequence
  chemically synthesized
ttttgtatttttagtagaga

SEQ ID NO: 48451 - DNA, 20 bp, Artificial Sequence
  chemically synthesized
tgtaaaatgttacgaaaacc

SEQ ID NO: 48452 - DNA, 20 bp, Artificial Sequence
  chemically synthesized
acgaaaaccaaaagtttttt

SEQ ID NO: 48453 - DNA, 20 bp, Artificial Sequence
  chemically synthesized
agcacctgacgtgaactgac

SEQ ID NO: 48454 - DNA, 20 bp, Artificial Sequence
  chemically synthesized
catattcatatattttgctg

SEQ ID NO: 48455 - DNA, 20 bp, Artificial Sequence
  chemically synthesized
catagattacagtatgcagc

SEQ ID NO: 48456 - DNA, 20 bp, Artificial Sequence
  chemically synthesized
tccagattcttccaagcaga

SEQ ID NO: 48457 - DNA, 20 bp, Artificial Sequence
  chemically synthesized
aaacaagttctgaggttcaa

SEQ ID NO: 48458 - DNA, 20 bp, Artificial Sequence
  chemically synthesized
gttcaaaaccgttttggccc

SEQ ID NO: 48459 - DNA, 20 bp, Artificial Sequence
  chemically synthesized
gtaggggccaaggaggagca

SEQ ID NO: 48460 - DNA, 20 bp, Artificial Sequence
  chemically synthesized
aggaggagcatggagtttgg

SEQ ID NO: 48461 - DNA, 20 bp, Artificial Sequence
  chemically synthesized
catagatagtggctgctata

SEQ ID NO: 48462 - DNA, 20 bp, Artificial Sequence
  chemically synthesized
tggaagtggggcctaatggg

SEQ ID NO: 48463 - DNA, 20 bp, Artificial Sequence
  chemically synthesized
atgggggaggaacccctgtg

SEQ ID NO: 48464 - DNA, 20 bp, Artificial Sequence
  chemically synthesized
ataatgagtaagttctcccg

SEQ ID NO: 48465 - DNA, 20 bp, Artificial Sequence
  chemically synthesized
ccgctatgatttcccttgaa

SEQ ID NO: 48466 - DNA, 20 bp, Artificial Sequence
  chemically synthesized
cttgaaggctgattattaaa

SEQ ID NO: 48467 - DNA, 20 bp, Artificial Sequence
  chemically synthesized
tggcacctccctctcttctc

SEQ ID NO: 48468 - DNA, 20 bp, Artificial Sequence
  chemically synthesized
ctcttgcttcttctcttgcc

SEQ ID NO: 48469 - DNA, 20 bp, Artificial Sequence
  chemically synthesized
caccttctgccatcagtgaa

SEQ ID NO: 48470 - DNA, 20 bp, Artificial Sequence
  chemically synthesized
accagaagcagatgctggtg

SEQ ID NO: 48471 - DNA, 20 bp, Artificial Sequence
  chemically synthesized
tgctggtgccatgcttcctg

SEQ ID NO: 48472 - DNA, 20 bp, Artificial Sequence
  chemically synthesized
catttgtagagcatctggat

SEQ ID NO: 48473 - DNA, 20 bp, Artificial Sequence
  chemically synthesized
ttggagctggaattcaggtc

SEQ ID NO: 48474 - DNA, 20 bp, Artificial Sequence
  chemically synthesized
cggtttcctggctccaaagc

SEQ ID NO: 48475 - DNA, 20 bp, Artificial Sequence
  chemically synthesized
tggcctatatgagttcttta

SEQ ID NO: 48476 - DNA, 20 bp, Artificial Sequence
  chemically synthesized
ggggtgagataaagtacacc

SEQ ID NO: 48477 - DNA, 20 bp, Artificial Sequence
  chemically synthesized
taaagtacacctagggtttg

SEQ ID NO: 48478 - DNA, 20 bp, Artificial Sequence
  chemically synthesized
atgtcttccatggccttctt

SEQ ID NO: 48479 - DNA, 20 bp, Artificial Sequence
  chemically synthesized
cactgcatatacactgggga

SEQ ID NO: 48480 - DNA, 20 bp, Artificial Sequence
  chemically synthesized
gggtaccaagcacagtaact

SEQ ID NO: 48481 - DNA, 20 bp, Artificial Sequence
  chemically synthesized
tattctcctcaccctggccc

SEQ ID NO: 48482 - DNA, 20 bp, Artificial Sequence
  chemically synthesized
tagtgcttcaaatcttaaaa

SEQ ID NO: 48483 - DNA, 20 bp, Artificial Sequence
  chemically synthesized
tcttaaaaaaacgtttttat

SEQ ID NO: 48484 - DNA, 20 bp, Artificial Sequence
  chemically synthesized
tggtgcagaagcacaaataa

SEQ ID NO: 48485 - DNA, 20 bp, Artificial Sequence
  chemically synthesized
gcacaaataaaaacgttttt

SEQ ID NO: 48486 - DNA, 20 bp, Artificial Sequence
  chemically synthesized
gggacttcactctggatagc

SEQ ID NO: 48487 - DNA, 20 bp, Artificial Sequence
  chemically synthesized
aggaattttggaccctagag

SEQ ID NO: 48488 - DNA, 20 bp, Artificial Sequence
  chemically synthesized
catcccagggccttgtccct

SEQ ID NO: 48489 - DNA, 20 bp, Artificial Sequence
  chemically synthesized
aatggctggcaggcagacca

SEQ ID NO: 48490 - DNA, 20 bp, Artificial Sequence
  chemically synthesized
gacgtaccactggggcatgg

SEQ ID NO: 48491 - DNA, 20 bp, Artificial Sequence
  chemically synthesized
atacagaaagccagtagtta

SEQ ID NO: 48492 - DNA, 20 bp, Artificial Sequence
  chemically synthesized
aatacatacttgctgtcccc

SEQ ID NO: 48493 - DNA, 20 bp, Artificial Sequence
  chemically synthesized
actacgggccacactcgaca

SEQ ID NO: 48494 - DNA, 20 bp, Artificial Sequence
  chemically synthesized
ataaattgagggaaaaaatc

SEQ ID NO: 48495 - DNA, 20 bp, Artificial Sequence
  chemically synthesized
ggtgagtaatttacaaggaa

SEQ ID NO: 48496 - DNA, 20 bp, Artificial Sequence
  chemically synthesized
ggaaaagggatttattcagc

SEQ ID NO: 48497 - DNA, 20 bp, Artificial Sequence
  chemically synthesized
ccaggaagcatggcaccagc

SEQ ID NO: 48498 - DNA, 20 bp, Artificial Sequence
  chemically synthesized
tgcttctggtgagggcctta

SEQ ID NO: 48499 - DNA, 20 bp, Artificial Sequence
  chemically synthesized
actgaggaccaaatttccac

SEQ ID NO: 48500 - DNA, 20 bp, Artificial Sequence
  chemically synthesized
attatagcagccactatcta

SEQ ID NO: 48501 - DNA, 20 bp, Artificial Sequence
  chemically synthesized
agcagccactatctatggtg

SEQ ID NO: 48502 - DNA, 20 bp, Artificial Sequence
  chemically synthesized
ccactatctatggtgatttg

SEQ ID NO: 48503 - DNA, 20 bp, Artificial Sequence
  chemically synthesized
aactgctctcaggcagacat

SEQ ID NO: 48504 - DNA, 20 bp, Artificial Sequence
  chemically synthesized
acccaaagccttagggccaa

SEQ ID NO: 48505 - DNA, 20 bp, Artificial Sequence
  chemically synthesized
aaacggttttgaacctcaga

SEQ ID NO: 48506 - DNA, 20 bp, Artificial Sequence
  chemically synthesized
gttttgaacctcagaacttg

SEQ ID NO: 48507 - DNA, 20 bp, Artificial Sequence
  chemically synthesized
ggcagtaatgggcaatcaga

SEQ ID NO: 48508 - DNA, 20 bp, Artificial Sequence
  chemically synthesized
aataaatcacaaaaaaaact

SEQ ID NO: 48509 - DNA, 20 bp, Artificial Sequence
  chemically synthesized
tcggatccactgaggaggtc

SEQ ID NO: 48510 - DNA, 20 bp, Artificial Sequence
  chemically synthesized
tggtggcaggtacctgtaat

SEQ ID NO: 48511 - DNA, 20 bp, Artificial Sequence
  chemically synthesized
tgtgctccttatcttccacc

SEQ ID NO: 48512 - DNA, 20 bp, Artificial Sequence
  chemically synthesized
catcatcgctgaactcctac

SEQ ID NO: 48513 - DNA, 20 bp, Artificial Sequence
  chemically synthesized
gtgacctcctctctctgggc

SEQ ID NO: 48514 - DNA, 20 bp, Artificial Sequence
  chemically synthesized
agtttctcatgactaaaaga

SEQ ID NO: 48515 - DNA, 20 bp, Artificial Sequence
  chemically synthesized
ggattggtctaaaaattatt

SEQ ID NO: 48516 - DNA, 20 bp, Artificial Sequence
  chemically synthesized
aaaaaatattttcattctaa

SEQ ID NO: 48517 - DNA, 20 bp, Artificial Sequence
  chemically synthesized
accagagaagaaacatcctc

SEQ ID NO: 48518 - DNA, 20 bp, Artificial Sequence
  chemically synthesized
ggttcaggtggtcatacagc

SEQ ID NO: 48519 - DNA, 20 bp, Artificial Sequence
  chemically synthesized
gtactcactatttccagaac

SEQ ID NO: 48520 - DNA, 20 bp, Artificial Sequence
  chemically synthesized
ttcccctctgccccaggagc

SEQ ID NO: 48521 - DNA, 20 bp, Artificial Sequence
  chemically synthesized
aaaactgcaagtgatccccc

SEQ ID NO: 48522 - DNA, 20 bp, Artificial Sequence
  chemically synthesized
ctgctgccactgagccgtag

SEQ ID NO: 48523 - DNA, 20 bp, Artificial Sequence
  chemically synthesized
gacgattgtcacctcccttt

SEQ ID NO: 48524 - DNA, 20 bp, Artificial Sequence
  chemically synthesized
ccacagctagtgagaggaag

SEQ ID NO: 48525 - DNA, 20 bp, Artificial Sequence
  chemically synthesized
ctagtggtctcgccccggga

SEQ ID NO: 48526 - DNA, 20 bp, Artificial Sequence
  chemically synthesized
ggccctccaccctccgctgc

SEQ ID NO: 48527 - DNA, 20 bp, Artificial Sequence
  chemically synthesized
ggaacccactataatggcaa

SEQ ID NO: 48528 - DNA, 20 bp, Artificial Sequence
  chemically synthesized
gtggctgtggttccgtgctc

SEQ ID NO: 48529 - DNA, 20 bp, Artificial Sequence
  chemically synthesized
gcggaaaccttctagggtgt

SEQ ID NO: 48530 - DNA, 20 bp, Artificial Sequence
  chemically synthesized
gagccccatcggacgatcct

SEQ ID NO: 48531 - DNA, 20 bp, Artificial Sequence
  chemically synthesized
ggaacccccggactggagga

SEQ ID NO: 48532 - DNA, 20 bp, Artificial Sequence
  chemically synthesized
cctcgccctccccaaacagc

SEQ ID NO: 48533 - DNA, 20 bp, Artificial Sequence
  chemically synthesized
ttctgccgggcccacctttt

SEQ ID NO: 48534 - DNA, 20 bp, Artificial Sequence
  chemically synthesized
taccaactagctgctccttg

SEQ ID NO: 48535 - DNA, 20 bp, Artificial Sequence
  chemically synthesized
aactagctgctccttgaaga

SEQ ID NO: 48536 - DNA, 20 bp, Artificial Sequence
  chemically synthesized
agctgctccttgaagagatt

SEQ ID NO: 48537 - DNA, 20 bp, Artificial Sequence
  chemically synthesized
gtccagcctacatgcatttc

SEQ ID NO: 48538 - DNA, 20 bp, Artificial Sequence
  chemically synthesized
atttcaagggatttatacta

SEQ ID NO: 48539 - DNA, 20 bp, Artificial Sequence
  chemically synthesized
gggatttatactacaaagat

SEQ ID NO: 48540 - DNA, 20 bp, Artificial Sequence
  chemically synthesized
atactacaaagattcaggtt

SEQ ID NO: 48541 - DNA, 20 bp, Artificial Sequence
  chemically synthesized
aattctatggtaggcacaag

SEQ ID NO: 48542 - DNA, 20 bp, Artificial Sequence
  chemically synthesized
aggcacaagctcagctttcc

SEQ ID NO: 48543 - DNA, 20 bp, Artificial Sequence
  chemically synthesized
tttccagaagattcaatttg

SEQ ID NO: 48544 - DNA, 20 bp, Artificial Sequence
  chemically synthesized
ggggaaagagagctcctggc

SEQ ID NO: 48545 - DNA, 20 bp, Artificial Sequence
  chemically synthesized
attgtacatgtggcatgaca

SEQ ID NO: 48546 - DNA, 20 bp, Artificial Sequence
  chemically synthesized
atcctcccttgcagatgcac

SEQ ID NO: 48547 - DNA, 20 bp, Artificial Sequence
  chemically synthesized
caaagttgatgctctttcca

SEQ ID NO: 48548 - DNA, 20 bp, Artificial Sequence
  chemically synthesized
cgcagcacagagtaggagct

SEQ ID NO: 48549 - DNA, 20 bp, Artificial Sequence
  chemically synthesized
taattggaattgtatttgca

SEQ ID NO: 48550 - DNA, 20 bp, Artificial Sequence
  chemically synthesized
tgtatttgcaatgtgctttt

SEQ ID NO: 48551 - DNA, 22 bp, Artificial Sequence
  chemically synthesized
gctcccatctattcttgctcca

SEQ ID NO: 48552 - DNA, 22 bp, Artificial Sequence
  chemically synthesized
ccatctattcttgctccagggg

SEQ ID NO: 48553 - DNA, 22 bp, Artificial Sequence
  chemically synthesized
ttcttgctccaggggaggcctt

SEQ ID NO: 48554 - DNA, 22 bp, Artificial Sequence
  chemically synthesized
ttgctccaggggaggcctttga

SEQ ID NO: 48555 - DNA, 22 bp, Artificial Sequence
  chemically synthesized
gctccaggggaggcctttgatg

SEQ ID NO: 48556 - DNA, 22 bp, Artificial Sequence
  chemically synthesized
ctccaggggaggcctttgatga

SEQ ID NO: 48557 - DNA, 22 bp, Artificial Sequence
  chemically synthesized
caggggaggcctttgatgagga

SEQ ID NO: 48558 - DNA, 22 bp, Artificial Sequence
  chemically synthesized
tgatgaggaagctgccaaaagc

SEQ ID NO: 48559 - DNA, 22 bp, Artificial Sequence
  chemically synthesized
gatgaggaagctgccaaaagca

SEQ ID NO: 48560 - DNA, 22 bp, Artificial Sequence
  chemically synthesized
atgaggaagctgccaaaagcac

SEQ ID NO: 48561 - DNA, 22 bp, Artificial Sequence
  chemically synthesized
ccaaaagcacattgcaaataca

SEQ ID NO: 48562 - DNA, 22 bp, Artificial Sequence
  chemically synthesized
caaatacaattccaattacagg

SEQ ID NO: 48563 - DNA, 22 bp, Artificial Sequence
  chemically synthesized
caattacaggcaacaggaagga

SEQ ID NO: 48564 - DNA, 22 bp, Artificial Sequence
  chemically synthesized
caggcaacaggaaggagaacca

SEQ ID NO: 48565 - DNA, 22 bp, Artificial Sequence
  chemically synthesized
tgccacctctgtcagcaaacca

SEQ ID NO: 48566 - DNA, 22 bp, Artificial Sequence
  chemically synthesized
ccacctctgtcagcaaaccatg

SEQ ID NO: 48567 - DNA, 22 bp, Artificial Sequence
  chemically synthesized
tgtcagcaaaccatgagctcct

SEQ ID NO: 48568 - DNA, 22 bp, Artificial Sequence
  chemically synthesized
tcagcaaaccatgagctcctac

SEQ ID NO: 48569 - DNA, 22 bp, Artificial Sequence
  chemically synthesized
ctactctgtgctgcgatggcgg

SEQ ID NO: 48570 - DNA, 22 bp, Artificial Sequence
  chemically synthesized
ctctgtgctgcgatggcgggct

SEQ ID NO: 48571 - DNA, 22 bp, Artificial Sequence
  chemically synthesized
tgtgctgcgatggcgggctcga

SEQ ID NO: 48572 - DNA, 22 bp, Artificial Sequence
  chemically synthesized
tgctgcgatggcgggctcgatg

SEQ ID NO: 48573 - DNA, 22 bp, Artificial Sequence
  chemically synthesized
cgatggcgggctcgatggggat

SEQ ID NO: 48574 - DNA, 22 bp, Artificial Sequence
  chemically synthesized
gatggggataactctgacctta

SEQ ID NO: 48575 - DNA, 22 bp, Artificial Sequence
  chemically synthesized
tgaccttacctcatggagtcac

SEQ ID NO: 48576 - DNA, 22 bp, Artificial Sequence
  chemically synthesized
accttacctcatggagtcactg

SEQ ID NO: 48577 - DNA, 22 bp, Artificial Sequence
  chemically synthesized
acctcatggagtcactgtcaac

SEQ ID NO: 48578 - DNA, 22 bp, Artificial Sequence
  chemically synthesized
cctcatggagtcactgtcaacc

SEQ ID NO: 48579 - DNA, 22 bp, Artificial Sequence
  chemically synthesized
atggagtcactgtcaacccact

SEQ ID NO: 48580 - DNA, 22 bp, Artificial Sequence
  chemically synthesized
tcaacccactggttgcactgtc

SEQ ID NO: 48581 - DNA, 22 bp, Artificial Sequence
  chemically synthesized
gttgcactgtctttgtgcactg

SEQ ID NO: 48582 - DNA, 22 bp, Artificial Sequence
  chemically synthesized
cactgtctttgtgcactggctc

SEQ ID NO: 48583 - DNA, 22 bp, Artificial Sequence
  chemically synthesized
tctttgtgcactggctctctgg

SEQ ID NO: 48584 - DNA, 22 bp, Artificial Sequence
  chemically synthesized
tgtgcactggctctctggagtg

SEQ ID NO: 48585 - DNA, 22 bp, Artificial Sequence
  chemically synthesized
gtgcactggctctctggagtga

SEQ ID NO: 48586 - DNA, 22 bp, Artificial Sequence
  chemically synthesized
tgcactggctctctggagtgag

SEQ ID NO: 48587 - DNA, 22 bp, Artificial Sequence
  chemically synthesized
gctctctggagtgaggtctttg

SEQ ID NO: 48588 - DNA, 22 bp, Artificial Sequence
  chemically synthesized
tctggagtgaggtctttgcaaa

SEQ ID NO: 48589 - DNA, 22 bp, Artificial Sequence
  chemically synthesized
tggagtgaggtctttgcaaaca

SEQ ID NO: 48590 - DNA, 22 bp, Artificial Sequence
  chemically synthesized
gagtgaggtctttgcaaacaaa

SEQ ID NO: 48591 - DNA, 22 bp, Artificial Sequence
  chemically synthesized
tgcaaacaaagtggaaagagca

SEQ ID NO: 48592 - DNA, 22 bp, Artificial Sequence
  chemically synthesized
gcaaacaaagtggaaagagcat

SEQ ID NO: 48593 - DNA, 22 bp, Artificial Sequence
  chemically synthesized
caaacaaagtggaaagagcatc

SEQ ID NO: 48594 - DNA, 22 bp, Artificial Sequence
  chemically synthesized
tggactccagcacctagattca

SEQ ID NO: 48595 - DNA, 22 bp, Artificial Sequence
  chemically synthesized
ggactccagcacctagattcag

SEQ ID NO: 48596 - DNA, 22 bp, Artificial Sequence
  chemically synthesized
gactccagcacctagattcaga

SEQ ID NO: 48597 - DNA, 22 bp, Artificial Sequence
  chemically synthesized
cagcacctagattcagagcagg

SEQ ID NO: 48598 - DNA, 22 bp, Artificial Sequence
  chemically synthesized
gattcagagcaggccatttcac

SEQ ID NO: 48599 - DNA, 22 bp, Artificial Sequence
  chemically synthesized
agagcaggccatttcactcgga

SEQ ID NO: 48600 - DNA, 22 bp, Artificial Sequence
  chemically synthesized
cactcggaatctgctgtgcatc

SEQ ID NO: 48601 - DNA, 22 bp, Artificial Sequence
  chemically synthesized
actcggaatctgctgtgcatct

SEQ ID NO: 48602 - DNA, 22 bp, Artificial Sequence
  chemically synthesized
ggaatctgctgtgcatctgcaa

SEQ ID NO: 48603 - DNA, 22 bp, Artificial Sequence
  chemically synthesized
ctgtgcatctgcaagggaggat

SEQ ID NO: 48604 - DNA, 22 bp, Artificial Sequence
  chemically synthesized
tgcatctgcaagggaggatcat

SEQ ID NO: 48605 - DNA, 22 bp, Artificial Sequence
  chemically synthesized
caagggaggatcataaattcgc

SEQ ID NO: 48606 - DNA, 22 bp, Artificial Sequence
  chemically synthesized
gcctttgtttcttcccagtatc

SEQ ID NO: 48607 - DNA, 22 bp, Artificial Sequence
  chemically synthesized
tgtttcttcccagtatcgacag

SEQ ID NO: 48608 - DNA, 22 bp, Artificial Sequence
  chemically synthesized
gtttcttcccagtatcgacagc

SEQ ID NO: 48609 - DNA, 22 bp, Artificial Sequence
  chemically synthesized
tttcttcccagtatcgacagcc

SEQ ID NO: 48610 - DNA, 22 bp, Artificial Sequence
  chemically synthesized
cttcccagtatcgacagccctt

SEQ ID NO: 48611 - DNA, 22 bp, Artificial Sequence
  chemically synthesized
ttcccagtatcgacagcccttc

SEQ ID NO: 48612 - DNA, 22 bp, Artificial Sequence
  chemically synthesized
cccagtatcgacagcccttcca

SEQ ID NO: 48613 - DNA, 22 bp, Artificial Sequence
  chemically synthesized
ccagtatcgacagcccttccag

SEQ ID NO: 48614 - DNA, 22 bp, Artificial Sequence
  chemically synthesized
ccagaaagagcaagcctcatgt

SEQ ID NO: 48615 - DNA, 22 bp, Artificial Sequence
  chemically synthesized
cagaaagagcaagcctcatgtc

SEQ ID NO: 48616 - DNA, 22 bp, Artificial Sequence
  chemically synthesized
atgtcatgccacatgtacaatc

SEQ ID NO: 48617 - DNA, 22 bp, Artificial Sequence
  chemically synthesized
aggccaggagctctctttcccc

SEQ ID NO: 48618 - DNA, 22 bp, Artificial Sequence
  chemically synthesized
tctttccccttttcatcctcct

SEQ ID NO: 48619 - DNA, 22 bp, Artificial Sequence
  chemically synthesized
tttccccttttcatcctcctgc

SEQ ID NO: 48620 - DNA, 22 bp, Artificial Sequence
  chemically synthesized
tccccttttcatcctcctgcct

SEQ ID NO: 48621 - DNA, 22 bp, Artificial Sequence
  chemically synthesized
ccccttttcatcctcctgcctg

SEQ ID NO: 48622 - DNA, 22 bp, Artificial Sequence
  chemically synthesized
cccttttcatcctcctgcctgg

SEQ ID NO: 48623 - DNA, 22 bp, Artificial Sequence
  chemically synthesized
ttcatcctcctgcctggtacac

SEQ ID NO: 48624 - DNA, 22 bp, Artificial Sequence
  chemically synthesized
tcatcctcctgcctggtacaca

SEQ ID NO: 48625 - DNA, 22 bp, Artificial Sequence
  chemically synthesized
catcctcctgcctggtacacaa

SEQ ID NO: 48626 - DNA, 22 bp, Artificial Sequence
  chemically synthesized
atcctcctgcctggtacacaat

SEQ ID NO: 48627 - DNA, 22 bp, Artificial Sequence
  chemically synthesized
ctgcctggtacacaataggtgt

SEQ ID NO: 48628 - DNA, 22 bp, Artificial Sequence
  chemically synthesized
cctggtacacaataggtgttta

SEQ ID NO: 48629 - DNA, 22 bp, Artificial Sequence
  chemically synthesized
gtacacaataggtgtttactgg

SEQ ID NO: 48630 - DNA, 22 bp, Artificial Sequence
  chemically synthesized
actggatgcttgtccagttgat

SEQ ID NO: 48631 - DNA, 22 bp, Artificial Sequence
  chemically synthesized
ctggatgcttgtccagttgatt

SEQ ID NO: 48632 - DNA, 22 bp, Artificial Sequence
  chemically synthesized
gatgcttgtccagttgatttct

SEQ ID NO: 48633 - DNA, 22 bp, Artificial Sequence
  chemically synthesized
gtccagttgatttcttgaacat

SEQ ID NO: 48634 - DNA, 22 bp, Artificial Sequence
  chemically synthesized
tccagttgatttcttgaacatg

SEQ ID NO: 48635 - DNA, 22 bp, Artificial Sequence
  chemically synthesized
atttcttgaacatggtgtgtaa

SEQ ID NO: 48636 - DNA, 22 bp, Artificial Sequence
  chemically synthesized
cttgaacatggtgtgtaaaagg

SEQ ID NO: 48637 - DNA, 22 bp, Artificial Sequence
  chemically synthesized
ttgaacatggtgtgtaaaagga

SEQ ID NO: 48638 - DNA, 22 bp, Artificial Sequence
  chemically synthesized
gaacatggtgtgtaaaaggaat

SEQ ID NO: 48639 - DNA, 22 bp, Artificial Sequence
  chemically synthesized
aacatggtgtgtaaaaggaatc

SEQ ID NO: 48640 - DNA, 22 bp, Artificial Sequence
  chemically synthesized
tgcaaattgaatcttctggaaa

SEQ ID NO: 48641 - DNA, 22 bp, Artificial Sequence
  chemically synthesized
gcaaattgaatcttctggaaag

SEQ ID NO: 48642 - DNA, 22 bp, Artificial Sequence
  chemically synthesized
caaattgaatcttctggaaagc

SEQ ID NO: 48643 - DNA, 22 bp, Artificial Sequence
  chemically synthesized
aatcttctggaaagctgagctt

SEQ ID NO: 48644 - DNA, 22 bp, Artificial Sequence
  chemically synthesized
ctggaaagctgagcttgtgcct

SEQ ID NO: 48645 - DNA, 22 bp, Artificial Sequence
  chemically synthesized
tggaaagctgagcttgtgccta

SEQ ID NO: 48646 - DNA, 22 bp, Artificial Sequence
  chemically synthesized
gaaagctgagcttgtgcctacc

SEQ ID NO: 48647 - DNA, 22 bp, Artificial Sequence
  chemically synthesized
agcttgtgcctaccatagaatt

SEQ ID NO: 48648 - DNA, 22 bp, Artificial Sequence
  chemically synthesized
gtgcctaccatagaattctgaa

SEQ ID NO: 48649 - DNA, 22 bp, Artificial Sequence
  chemically synthesized
tgcctaccatagaattctgaat

SEQ ID NO: 48650 - DNA, 22 bp, Artificial Sequence
  chemically synthesized
ccatagaattctgaatgtacct

SEQ ID NO: 48651 - DNA, 22 bp, Artificial Sequence
  chemically synthesized
tgaatgtacctatatgacgtct

SEQ ID NO: 48652 - DNA, 22 bp, Artificial Sequence
  chemically synthesized
aatgtacctatatgacgtcttt

SEQ ID NO: 48653 - DNA, 22 bp, Artificial Sequence
  chemically synthesized
tatgacgtctttgcaaacttaa

SEQ ID NO: 48654 - DNA, 22 bp, Artificial Sequence
  chemically synthesized
tgcaaacttaaaacctgaatct

SEQ ID NO: 48655 - DNA, 22 bp, Artificial Sequence
  chemically synthesized
gcaaacttaaaacctgaatctt

SEQ ID NO: 48656 - DNA, 22 bp, Artificial Sequence
  chemically synthesized
caaacttaaaacctgaatcttt

SEQ ID NO: 48657 - DNA, 22 bp, Artificial Sequence
  chemically synthesized
aaaacctgaatctttgtagtat

SEQ ID NO: 48658 - DNA, 22 bp, Artificial Sequence
  chemically synthesized
aaacctgaatctttgtagtata

SEQ ID NO: 48659 - DNA, 22 bp, Artificial Sequence
  chemically synthesized
aatctttgtagtataaatccct

SEQ ID NO: 48660 - DNA, 22 bp, Artificial Sequence
  chemically synthesized
tgtagtataaatcccttgaaat

SEQ ID NO: 48661 - DNA, 22 bp, Artificial Sequence
  chemically synthesized
gtagtataaatcccttgaaatg

SEQ ID NO: 48662 - DNA, 22 bp, Artificial Sequence
  chemically synthesized
tagtataaatcccttgaaatgc

SEQ ID NO: 48663 - DNA, 22 bp, Artificial Sequence
  chemically synthesized
gaaatgcatgtaggctggacat

SEQ ID NO: 48664 - DNA, 22 bp, Artificial Sequence
  chemically synthesized
aaatgcatgtaggctggacatc

SEQ ID NO: 48665 - DNA, 22 bp, Artificial Sequence
  chemically synthesized
gacatcaaaagcaagcaatctc

SEQ ID NO: 48666 - DNA, 22 bp, Artificial Sequence
  chemically synthesized
ttcaaggagcagctagttggta

SEQ ID NO: 48667 - DNA, 22 bp, Artificial Sequence
  chemically synthesized
caaggagcagctagttggtaag

SEQ ID NO: 48668 - DNA, 22 bp, Artificial Sequence
  chemically synthesized
aaggagcagctagttggtaagg

SEQ ID NO: 48669 - DNA, 22 bp, Artificial Sequence
  chemically synthesized
gttggtaaggtcagtgtgcagg

SEQ ID NO: 48670 - DNA, 22 bp, Artificial Sequence
  chemically synthesized
gtaaggtcagtgtgcagggtgc

SEQ ID NO: 48671 - DNA, 22 bp, Artificial Sequence
  chemically synthesized
agtttagaaggctgccaggtta

SEQ ID NO: 48672 - DNA, 22 bp, Artificial Sequence
  chemically synthesized
agaaggctgccaggttaaggcc

SEQ ID NO: 48673 - DNA, 22 bp, Artificial Sequence
  chemically synthesized
gaaggctgccaggttaaggcca

SEQ ID NO: 48674 - DNA, 22 bp, Artificial Sequence
  chemically synthesized
ccaggttaaggccagtggaaag

SEQ ID NO: 48675 - DNA, 22 bp, Artificial Sequence
  chemically synthesized
aggccagtggaaagaattcggt

SEQ ID NO: 48676 - DNA, 22 bp, Artificial Sequence
  chemically synthesized
ggtgggcagcgaggagtccaca

SEQ ID NO: 48677 - DNA, 22 bp, Artificial Sequence
  chemically synthesized
attcagaagtctcactggtcag

SEQ ID NO: 48678 - DNA, 22 bp, Artificial Sequence
  chemically synthesized
agaagtctcactggtcagcagg

SEQ ID NO: 48679 - DNA, 22 bp, Artificial Sequence
  chemically synthesized
actggtcagcaggagacaaggt

SEQ ID NO: 48680 - DNA, 22 bp, Artificial Sequence
  chemically synthesized
gtcagcaggagacaaggtggac

SEQ ID NO: 48681 - DNA, 22 bp, Artificial Sequence
  chemically synthesized
aaaaggtgggcccggcagaact

SEQ ID NO: 48682 - DNA, 22 bp, Artificial Sequence
  chemically synthesized
ggagtctggcatcccacgcagg

SEQ ID NO: 48683 - DNA, 22 bp, Artificial Sequence
  chemically synthesized
gagtctggcatcccacgcaggg

SEQ ID NO: 48684 - DNA, 22 bp, Artificial Sequence
  chemically synthesized
gcatcccacgcagggtgagagg

SEQ ID NO: 48685 - DNA, 22 bp, Artificial Sequence
  chemically synthesized
gggcgccggcctgccttccagc

SEQ ID NO: 48686 - DNA, 22 bp, Artificial Sequence
  chemically synthesized
ccttccagcccagttaggattt

SEQ ID NO: 48687 - DNA, 22 bp, Artificial Sequence
  chemically synthesized
ccagcccagttaggatttggga

SEQ ID NO: 48688 - DNA, 22 bp, Artificial Sequence
  chemically synthesized
cagcccagttaggatttgggag

SEQ ID NO: 48689 - DNA, 22 bp, Artificial Sequence
  chemically synthesized
ggatttgggagttttttcttcc

SEQ ID NO: 48690 - DNA, 22 bp, Artificial Sequence
  chemically synthesized
gggagttttttcttccctctgc

SEQ ID NO: 48691 - DNA, 22 bp, Artificial Sequence
  chemically synthesized
ggagttttttcttccctctgcg

SEQ ID NO: 48692 - DNA, 22 bp, Artificial Sequence
  chemically synthesized
tttcttccctctgcgcgtaatc

SEQ ID NO: 48693 - DNA, 22 bp, Artificial Sequence
  chemically synthesized
ttcttccctctgcgcgtaatct

SEQ ID NO: 48694 - DNA, 22 bp, Artificial Sequence
  chemically synthesized
tcttccctctgcgcgtaatctg

SEQ ID NO: 48695 - DNA, 22 bp, Artificial Sequence
  chemically synthesized
cttccctctgcgcgtaatctga

SEQ ID NO: 48696 - DNA, 22 bp, Artificial Sequence
  chemically synthesized
ttccctctgcgcgtaatctgac

SEQ ID NO: 48697 - DNA, 22 bp, Artificial Sequence
  chemically synthesized
ccctctgcgcgtaatctgacgc

SEQ ID NO: 48698 - DNA, 22 bp, Artificial Sequence
  chemically synthesized
cctctgcgcgtaatctgacgct

SEQ ID NO: 48699 - DNA, 22 bp, Artificial Sequence
  chemically synthesized
tgcgcgtaatctgacgctgttt

SEQ ID NO: 48700 - DNA, 22 bp, Artificial Sequence
  chemically synthesized
cgcgtaatctgacgctgtttgg

SEQ ID NO: 48701 - DNA, 22 bp, Artificial Sequence
  chemically synthesized
acgctgtttggggagggcgagg

SEQ ID NO: 48702 - DNA, 22 bp, Artificial Sequence
  chemically synthesized
tttggggagggcgaggccgaaa

SEQ ID NO: 48703 - DNA, 22 bp, Artificial Sequence
  chemically synthesized
ggggagggcgaggccgaaacct

SEQ ID NO: 48704 - DNA, 22 bp, Artificial Sequence
  chemically synthesized
gggagggcgaggccgaaacctg

SEQ ID NO: 48705 - DNA, 22 bp, Artificial Sequence
  chemically synthesized
atcctccagtccgggggttccg

SEQ ID NO: 48706 - DNA, 22 bp, Artificial Sequence
  chemically synthesized
cagtccgggggttccgttaatg

SEQ ID NO: 48707 - DNA, 22 bp, Artificial Sequence
  chemically synthesized
cgttaatgtttaatcagatagg

SEQ ID NO: 48708 - DNA, 22 bp, Artificial Sequence
  chemically synthesized
atgtttaatcagataggatcgt

SEQ ID NO: 48709 - DNA, 22 bp, Artificial Sequence
  chemically synthesized
aatcagataggatcgtccgatg

SEQ ID NO: 48710 - DNA, 22 bp, Artificial Sequence
  chemically synthesized
atcagataggatcgtccgatgg

SEQ ID NO: 48711 - DNA, 22 bp, Artificial Sequence
  chemically synthesized
tggtggcgtgatctgcgcgccc

SEQ ID NO: 48712 - DNA, 22 bp, Artificial Sequence
  chemically synthesized
gtggcgtgatctgcgcgcccca

SEQ ID NO: 48713 - DNA, 22 bp, Artificial Sequence
  chemically synthesized
cgcgccccaggcgtcaagcacc

SEQ ID NO: 48714 - DNA, 22 bp, Artificial Sequence
  chemically synthesized
gaaggtttccgcagcgacgtcg

SEQ ID NO: 48715 - DNA, 22 bp, Artificial Sequence
  chemically synthesized
ccgcagcgacgtcgaggcgctc

SEQ ID NO: 48716 - DNA, 22 bp, Artificial Sequence
  chemically synthesized
cgcagcgacgtcgaggcgctca

SEQ ID NO: 48717 - DNA, 22 bp, Artificial Sequence
  chemically synthesized
atggttgcaggcgggcgccgcc

SEQ ID NO: 48718 - DNA, 22 bp, Artificial Sequence
  chemically synthesized
caggcgggcgccgccgttcagt

SEQ ID NO: 48719 - DNA, 22 bp, Artificial Sequence
  chemically synthesized
agttcagggtctgagcctggag

SEQ ID NO: 48720 - DNA, 22 bp, Artificial Sequence
  chemically synthesized
agggtctgagcctggaggagtg

SEQ ID NO: 48721 - DNA, 22 bp, Artificial Sequence
  chemically synthesized
agcctggaggagtgagccaggc

SEQ ID NO: 48722 - DNA, 22 bp, Artificial Sequence
  chemically synthesized
gaggagtgagccaggcagtgag

SEQ ID NO: 48723 - DNA, 22 bp, Artificial Sequence
  chemically synthesized
gctcgggcgggccgggacgcgt

SEQ ID NO: 48724 - DNA, 22 bp, Artificial Sequence
  chemically synthesized
gggcgggccgggacgcgtcgtt

SEQ ID NO: 48725 - DNA, 22 bp, Artificial Sequence
  chemically synthesized
cagcagcggctcccagctccca

SEQ ID NO: 48726 - DNA, 22 bp, Artificial Sequence
  chemically synthesized
ccagctcccagccaggattccg

SEQ ID NO: 48727 - DNA, 22 bp, Artificial Sequence
  chemically synthesized
ccagccaggattccgcgcgccc

SEQ ID NO: 48728 - DNA, 22 bp, Artificial Sequence
  chemically synthesized
cgcgcgccccttcacgcgccct

SEQ ID NO: 48729 - DNA, 22 bp, Artificial Sequence
  chemically synthesized
cacgcgccctgctcctgaactt

SEQ ID NO: 48730 - DNA, 22 bp, Artificial Sequence
  chemically synthesized
acgcgccctgctcctgaacttc

SEQ ID NO: 48731 - DNA, 22 bp, Artificial Sequence
  chemically synthesized
ctcctgaacttcagctcctgca

SEQ ID NO: 48732 - DNA, 22 bp, Artificial Sequence
  chemically synthesized
ctgaacttcagctcctgcacag

SEQ ID NO: 48733 - DNA, 22 bp, Artificial Sequence
  chemically synthesized
aacttcagctcctgcacagtcc

SEQ ID NO: 48734 - DNA, 22 bp, Artificial Sequence
  chemically synthesized
cagctcctgcacagtcctcccc

SEQ ID NO: 48735 - DNA, 22 bp, Artificial Sequence
  chemically synthesized
agctcctgcacagtcctcccca

SEQ ID NO: 48736 - DNA, 22 bp, Artificial Sequence
  chemically synthesized
ctgcacagtcctccccaccgca

SEQ ID NO: 48737 - DNA, 22 bp, Artificial Sequence
  chemically synthesized
cacagtcctccccaccgcaagg

SEQ ID NO: 48738 - DNA, 22 bp, Artificial Sequence
  chemically synthesized
cccaccgcaaggctcaaggcgc

SEQ ID NO: 48739 - DNA, 22 bp, Artificial Sequence
  chemically synthesized
aaggcgccgccggcgtggaccg

SEQ ID NO: 48740 - DNA, 22 bp, Artificial Sequence
  chemically synthesized
taggtctcctcgccaggacagc

SEQ ID NO: 48741 - DNA, 22 bp, Artificial Sequence
  chemically synthesized
ggtctcctcgccaggacagcaa

SEQ ID NO: 48742 - DNA, 22 bp, Artificial Sequence
  chemically synthesized
ctcgccaggacagcaacctctc

SEQ ID NO: 48743 - DNA, 22 bp, Artificial Sequence
  chemically synthesized
gccaggacagcaacctctcccc

SEQ ID NO: 48744 - DNA, 22 bp, Artificial Sequence
  chemically synthesized
tcccctggccctcatgggcacc

SEQ ID NO: 48745 - DNA, 22 bp, Artificial Sequence
  chemically synthesized
ccctggccctcatgggcaccgt

SEQ ID NO: 48746 - DNA, 22 bp, Artificial Sequence
  chemically synthesized
gccctcatgggcaccgtcagct

SEQ ID NO: 48747 - DNA, 22 bp, Artificial Sequence
  chemically synthesized
atgggcaccgtcagctccaggc

SEQ ID NO: 48748 - DNA, 22 bp, Artificial Sequence
  chemically synthesized
caggcggtcctggtggccgctg

SEQ ID NO: 48749 - DNA, 22 bp, Artificial Sequence
  chemically synthesized
gtggccgctgccactgctgctg

SEQ ID NO: 48750 - DNA, 22 bp, Artificial Sequence
  chemically synthesized
ccactgctgctgctgctgctgc

SEQ ID NO: 48751 - DNA, 22 bp, Artificial Sequence
  chemically synthesized
ctgctgctgctgctgctgctcc

SEQ ID NO: 48752 - DNA, 22 bp, Artificial Sequence
  chemically synthesized
ctgctgctgctgctgctcctgg

SEQ ID NO: 48753 - DNA, 22 bp, Artificial Sequence
  chemically synthesized
ctgctgctgctgctcctgggtc

SEQ ID NO: 48754 - DNA, 22 bp, Artificial Sequence
  chemically synthesized
ctgctgctgctcctgggtcccg

SEQ ID NO: 48755 - DNA, 22 bp, Artificial Sequence
  chemically synthesized
ctgctgctcctgggtcccgcgg

SEQ ID NO: 48756 - DNA, 22 bp, Artificial Sequence
  chemically synthesized
ctgctcctgggtcccgcgggcg

SEQ ID NO: 48757 - DNA, 22 bp, Artificial Sequence
  chemically synthesized
ctcctgggtcccgcgggcgccc

SEQ ID NO: 48758 - DNA, 22 bp, Artificial Sequence
  chemically synthesized
ctgggtcccgcgggcgcccgtg

SEQ ID NO: 48759 - DNA, 22 bp, Artificial Sequence
  chemically synthesized
ggtcccgcgggcgcccgtgcgc

SEQ ID NO: 48760 - DNA, 22 bp, Artificial Sequence
  chemically synthesized
cgaggagctggtgctagccttg

SEQ ID NO: 48761 - DNA, 22 bp, Artificial Sequence
  chemically synthesized
gtgctagccttgcgttccgagg

SEQ ID NO: 48762 - DNA, 22 bp, Artificial Sequence
  chemically synthesized
gccttgcgttccgaggaggacg

SEQ ID NO: 48763 - DNA, 22 bp, Artificial Sequence
  chemically synthesized
gcgttccgaggaggacggcctg

SEQ ID NO: 48764 - DNA, 22 bp, Artificial Sequence
  chemically synthesized
cgttccgaggaggacggcctgg

SEQ ID NO: 48765 - DNA, 22 bp, Artificial Sequence
  chemically synthesized
cgaggaggacggcctggccgaa

SEQ ID NO: 48766 - DNA, 22 bp, Artificial Sequence
  chemically synthesized
gccgaagcacccgagcacggaa

SEQ ID NO: 48767 - DNA, 22 bp, Artificial Sequence
  chemically synthesized
ccaccgctgcgccaaggtgcgg

SEQ ID NO: 48768 - DNA, 22 bp, Artificial Sequence
  chemically synthesized
caccgctgcgccaaggtgcggg

SEQ ID NO: 48769 - DNA, 22 bp, Artificial Sequence
  chemically synthesized
cgccaaggtgcgggtgtaggga

SEQ ID NO: 48770 - DNA, 22 bp, Artificial Sequence
  chemically synthesized
tttcctctcgggcctcagtttc

SEQ ID NO: 48771 - DNA, 22 bp, Artificial Sequence
  chemically synthesized
cctctcgggcctcagtttcccc

SEQ ID NO: 48772 - DNA, 22 bp, Artificial Sequence
  chemically synthesized
ctctcgggcctcagtttccccc

SEQ ID NO: 48773 - DNA, 22 bp, Artificial Sequence
  chemically synthesized
tcgggcctcagtttccccccat

SEQ ID NO: 48774 - DNA, 22 bp, Artificial Sequence
  chemically synthesized
gggcctcagtttccccccatgt

SEQ ID NO: 48775 - DNA, 22 bp, Artificial Sequence
  chemically synthesized
agtttccccccatgtaagagag

SEQ ID NO: 48776 - DNA, 22 bp, Artificial Sequence
  chemically synthesized
ccccccatgtaagagaggaagt

SEQ ID NO: 48777 - DNA, 22 bp, Artificial Sequence
  chemically synthesized
cccccatgtaagagaggaagtg

SEQ ID NO: 48778 - DNA, 22 bp, Artificial Sequence
  chemically synthesized
ttcgcttggcacgatcttgggg

SEQ ID NO: 48779 - DNA, 22 bp, Artificial Sequence
  chemically synthesized
cgcttggcacgatcttggggac

SEQ ID NO: 48780 - DNA, 22 bp, Artificial Sequence
  chemically synthesized
gcttggcacgatcttggggact

SEQ ID NO: 48781 - DNA, 22 bp, Artificial Sequence
  chemically synthesized
ggcacgatcttggggactgcag

SEQ ID NO: 48782 - DNA, 22 bp, Artificial Sequence
  chemically synthesized
gcacgatcttggggactgcagg

SEQ ID NO: 48783 - DNA, 22 bp, Artificial Sequence
  chemically synthesized
ggggactgcaggcaaggcggcg

SEQ ID NO: 48784 - DNA, 22 bp, Artificial Sequence
  chemically synthesized
gggactgcaggcaaggcggcgg

SEQ ID NO: 48785 - DNA, 22 bp, Artificial Sequence
  chemically synthesized
caggcaaggcggcgggggagga

SEQ ID NO: 48786 - DNA, 22 bp, Artificial Sequence
  chemically synthesized
tttggggacttgctggggcgtg

SEQ ID NO: 48787 - DNA, 22 bp, Artificial Sequence
  chemically synthesized
tggggacttgctggggcgtgcg

SEQ ID NO: 48788 - DNA, 22 bp, Artificial Sequence
  chemically synthesized
ggggacttgctggggcgtgcgg

SEQ ID NO: 48789 - DNA, 22 bp, Artificial Sequence
  chemically synthesized
gggacttgctggggcgtgcggc

SEQ ID NO: 48790 - DNA, 22 bp, Artificial Sequence
  chemically synthesized
gctggggcgtgcggctgcgcta

SEQ ID NO: 48791 - DNA, 22 bp, Artificial Sequence
  chemically synthesized
ctggggcgtgcggctgcgctat

SEQ ID NO: 48792 - DNA, 22 bp, Artificial Sequence
  chemically synthesized
gggcgtgcggctgcgctattca

SEQ ID NO: 48793 - DNA, 22 bp, Artificial Sequence
  chemically synthesized
cgctattcagtgggaaggttcg

SEQ ID NO: 48794 - DNA, 22 bp, Artificial Sequence
  chemically synthesized
ttcagtgggaaggttcgcgggg

SEQ ID NO: 48795 - DNA, 22 bp, Artificial Sequence
  chemically synthesized
agtgggaaggttcgcggggttg

SEQ ID NO: 48796 - DNA, 22 bp, Artificial Sequence
  chemically synthesized
gcggggttgggagacccggagg

SEQ ID NO: 48797 - DNA, 22 bp, Artificial Sequence
  chemically synthesized
ggagacccggaggccgaggaag

SEQ ID NO: 48798 - DNA, 22 bp, Artificial Sequence
  chemically synthesized
ccaggatatcctgcccagattt

SEQ ID NO: 48799 - DNA, 22 bp, Artificial Sequence
  chemically synthesized
cccagatttcccagtttctgcc

SEQ ID NO: 48800 - DNA, 22 bp, Artificial Sequence
  chemically synthesized
cccagtttctgcctcgccgcgg

SEQ ID NO: 48801 - DNA, 22 bp, Artificial Sequence
  chemically synthesized
ccagtttctgcctcgccgcggc

SEQ ID NO: 48802 - DNA, 22 bp, Artificial Sequence
  chemically synthesized
ctgcctcgccgcggcacaggtg

SEQ ID NO: 48803 - DNA, 22 bp, Artificial Sequence
  chemically synthesized
tgcctcgccgcggcacaggtgg

SEQ ID NO: 48804 - DNA, 22 bp, Artificial Sequence
  chemically synthesized
cctcgccgcggcacaggtgggt

SEQ ID NO: 48805 - DNA, 22 bp, Artificial Sequence
  chemically synthesized
gccgcggcacaggtgggtgaag

SEQ ID NO: 48806 - DNA, 22 bp, Artificial Sequence
  chemically synthesized
gaacgtactgggaactgcacca

SEQ ID NO: 48807 - DNA, 22 bp, Artificial Sequence
  chemically synthesized
ggaactgcaccaggcacagaga

SEQ ID NO: 48808 - DNA, 22 bp, Artificial Sequence
  chemically synthesized
caccaggcacagagaaagcggg

SEQ ID NO: 48809 - DNA, 22 bp, Artificial Sequence
  chemically synthesized
gccattatagtgggttccgatt

SEQ ID NO: 48810 - DNA, 22 bp, Artificial Sequence
  chemically synthesized
ccattatagtgggttccgattt

SEQ ID NO: 48811 - DNA, 22 bp, Artificial Sequence
  chemically synthesized
tagtgggttccgatttggtttg

SEQ ID NO: 48812 - DNA, 22 bp, Artificial Sequence
  chemically synthesized
cgatttggtttggaaaacatgg

SEQ ID NO: 48813 - DNA, 22 bp, Artificial Sequence
  chemically synthesized
ggtttggaaaacatgggcagcg

SEQ ID NO: 48814 - DNA, 22 bp, Artificial Sequence
  chemically synthesized
gtttggaaaacatgggcagcgg

SEQ ID NO: 48815 - DNA, 22 bp, Artificial Sequence
  chemically synthesized
ggaaaacatgggcagcggaggg

SEQ ID NO: 48816 - DNA, 22 bp, Artificial Sequence
  chemically synthesized
gaaaacatgggcagcggagggt

SEQ ID NO: 48817 - DNA, 22 bp, Artificial Sequence
  chemically synthesized
gagagaaggccctacccgagac

SEQ ID NO: 48818 - DNA, 22 bp, Artificial Sequence
  chemically synthesized
cccgagacaggggcggggtggg

SEQ ID NO: 48819 - DNA, 22 bp, Artificial Sequence
  chemically synthesized
ggagcacgaggcaatttcttta

SEQ ID NO: 48820 - DNA, 22 bp, Artificial Sequence
  chemically synthesized
ctttatgacacagaactcatgc

SEQ ID NO: 48821 - DNA, 22 bp, Artificial Sequence
  chemically synthesized
tttatgacacagaactcatgct

SEQ ID NO: 48822 - DNA, 22 bp, Artificial Sequence
  chemically synthesized
tatgacacagaactcatgctct

SEQ ID NO: 48823 - DNA, 22 bp, Artificial Sequence
  chemically synthesized
atgacacagaactcatgctcta

SEQ ID NO: 48824 - DNA, 22 bp, Artificial Sequence
  chemically synthesized
tgacacagaactcatgctctag

SEQ ID NO: 48825 - DNA, 22 bp, Artificial Sequence
  chemically synthesized
atgctctagtattccatctgtt

SEQ ID NO: 48826 - DNA, 22 bp, Artificial Sequence
  chemically synthesized
tagtattccatctgtttcagcc

SEQ ID NO: 48827 - DNA, 22 bp, Artificial Sequence
  chemically synthesized
gtattccatctgtttcagccga

SEQ ID NO: 48828 - DNA, 22 bp, Artificial Sequence
  chemically synthesized
catctgtttcagccgaagaaaa

SEQ ID NO: 48829 - DNA, 22 bp, Artificial Sequence
  chemically synthesized
tttcagccgaagaaaagaacca

SEQ ID NO: 48830 - DNA, 22 bp, Artificial Sequence
  chemically synthesized
cagccgaagaaaagaaccagct

SEQ ID NO: 48831 - DNA, 22 bp, Artificial Sequence
  chemically synthesized
agccgaagaaaagaaccagctg

SEQ ID NO: 48832 - DNA, 22 bp, Artificial Sequence
  chemically synthesized
aaggggcaggggagaaggggcg

SEQ ID NO: 48833 - DNA, 22 bp, Artificial Sequence
  chemically synthesized
tcgaggcccattggcgtccttt

SEQ ID NO: 48834 - DNA, 22 bp, Artificial Sequence
  chemically synthesized
gaggcccattggcgtcctttag

SEQ ID NO: 48835 - DNA, 22 bp, Artificial Sequence
  chemically synthesized
gcgtcctttaggactcaggcag

SEQ ID NO: 48836 - DNA, 22 bp, Artificial Sequence
  chemically synthesized
taggactcaggcagggaagggc

SEQ ID NO: 48837 - DNA, 22 bp, Artificial Sequence
  chemically synthesized
aggactcaggcagggaagggcc

SEQ ID NO: 48838 - DNA, 22 bp, Artificial Sequence
  chemically synthesized
ggactcaggcagggaagggccc

SEQ ID NO: 48839 - DNA, 22 bp, Artificial Sequence
  chemically synthesized
aggcagggaagggcccttggtg

SEQ ID NO: 48840 - DNA, 22 bp, Artificial Sequence
  chemically synthesized
ggtgctctggagccggaggtgg

SEQ ID NO: 48841 - DNA, 22 bp, Artificial Sequence
  chemically synthesized
gtgctctggagccggaggtggt

SEQ ID NO: 48842 - DNA, 22 bp, Artificial Sequence
  chemically synthesized
tggagccggaggtggtgcgcct

SEQ ID NO: 48843 - DNA, 22 bp, Artificial Sequence
  chemically synthesized
gagccggaggtggtgcgcctgg

SEQ ID NO: 48844 - DNA, 22 bp, Artificial Sequence
  chemically synthesized
gtactgggaccccggagctgag

SEQ ID NO: 48845 - DNA, 22 bp, Artificial Sequence
  chemically synthesized
ggaccccggagctgagcccggc

SEQ ID NO: 48846 - DNA, 22 bp, Artificial Sequence
  chemically synthesized
agcccggcgcctcagcccacct

SEQ ID NO: 48847 - DNA, 22 bp, Artificial Sequence
  chemically synthesized
agcccacctggctgtctgccga

SEQ ID NO: 48848 - DNA, 22 bp, Artificial Sequence
  chemically synthesized
gctgtctgccgaccgtgtgcgg

SEQ ID NO: 48849 - DNA, 22 bp, Artificial Sequence
  chemically synthesized
tctgccgaccgtgtgcggggcg

SEQ ID NO: 48850 - DNA, 22 bp, Artificial Sequence
  chemically synthesized
ccgaccgtgtgcggggcgagtt

SEQ ID NO: 48851 - DNA, 22 bp, Artificial Sequence
  chemically synthesized
gctcaacaactctgccagcttc

SEQ ID NO: 48852 - DNA, 22 bp, Artificial Sequence
  chemically synthesized
ctcaacaactctgccagcttct

SEQ ID NO: 48853 - DNA, 22 bp, Artificial Sequence
  chemically synthesized
aacaactctgccagcttctggc

SEQ ID NO: 48854 - DNA, 22 bp, Artificial Sequence
  chemically synthesized
tgccagcttctggccctcaggc

SEQ ID NO: 48855 - DNA, 22 bp, Artificial Sequence
  chemically synthesized
ccagcttctggccctcaggctg

SEQ ID NO: 48856 - DNA, 22 bp, Artificial Sequence
  chemically synthesized
ctggccctcaggctgtgggaag

SEQ ID NO: 48857 - DNA, 22 bp, Artificial Sequence
  chemically synthesized
tggccctcaggctgtgggaagc

SEQ ID NO: 48858 - DNA, 22 bp, Artificial Sequence
  chemically synthesized
gccctcaggctgtgggaagctt

SEQ ID NO: 48859 - DNA, 22 bp, Artificial Sequence
  chemically synthesized
aggctgtgggaagcttcttccc

SEQ ID NO: 48860 - DNA, 22 bp, Artificial Sequence
  chemically synthesized
tgggaagcttcttcccggggcg

SEQ ID NO: 48861 - DNA, 22 bp, Artificial Sequence
  chemically synthesized
cttcccggggcgagaccactag

SEQ ID NO: 48862 - DNA, 22 bp, Artificial Sequence
  chemically synthesized
ttcccggggcgagaccactagc

SEQ ID NO: 48863 - DNA, 22 bp, Artificial Sequence
  chemically synthesized
cccggggcgagaccactagctt

SEQ ID NO: 48864 - DNA, 22 bp, Artificial Sequence
  chemically synthesized
ccggggcgagaccactagcttt

SEQ ID NO: 48865 - DNA, 22 bp, Artificial Sequence
  chemically synthesized
gctttttctaagtattaccagc

SEQ ID NO: 48866 - DNA, 22 bp, Artificial Sequence
  chemically synthesized
tttctaagtattaccagcccag

SEQ ID NO: 48867 - DNA, 22 bp, Artificial Sequence
  chemically synthesized
ttctaagtattaccagcccagg

SEQ ID NO: 48868 - DNA, 22 bp, Artificial Sequence
  chemically synthesized
tctaagtattaccagcccagga

SEQ ID NO: 48869 - DNA, 22 bp, Artificial Sequence
  chemically synthesized
ctaagtattaccagcccaggac

SEQ ID NO: 48870 - DNA, 22 bp, Artificial Sequence
  chemically synthesized
taagtattaccagcccaggact

SEQ ID NO: 48871 - DNA, 22 bp, Artificial Sequence
  chemically synthesized
agtattaccagcccaggacttg

SEQ ID NO: 48872 - DNA, 22 bp, Artificial Sequence
  chemically synthesized
ccagcccaggacttggctgagg

SEQ ID NO: 48873 - DNA, 22 bp, Artificial Sequence
  chemically synthesized
ggctgaggttctgtgtccccca

SEQ ID NO: 48874 - DNA, 22 bp, Artificial Sequence
  chemically synthesized
gctgaggttctgtgtcccccag

SEQ ID NO: 48875 - DNA, 22 bp, Artificial Sequence
  chemically synthesized
aggttctgtgtcccccagcttg

SEQ ID NO: 48876 - DNA, 22 bp, Artificial Sequence
  chemically synthesized
tgtgtcccccagcttggagtca

SEQ ID NO: 48877 - DNA, 22 bp, Artificial Sequence
  chemically synthesized
tgtcccccagcttggagtcaga

SEQ ID NO: 48878 - DNA, 22 bp, Artificial Sequence
  chemically synthesized
ggagtcagatgtggggttgaat

SEQ ID NO: 48879 - DNA, 22 bp, Artificial Sequence
  chemically synthesized
gagtcagatgtggggttgaatc

SEQ ID NO: 48880 - DNA, 22 bp, Artificial Sequence
  chemically synthesized
aatcttggcttcctctcactag

SEQ ID NO: 48881 - DNA, 22 bp, Artificial Sequence
  chemically synthesized
ggcttcctctcactagctgtgg

SEQ ID NO: 48882 - DNA, 22 bp, Artificial Sequence
  chemically synthesized
gcttcctctcactagctgtggt

SEQ ID NO: 48883 - DNA, 22 bp, Artificial Sequence
  chemically synthesized
cctctcactagctgtggtgctt

SEQ ID NO: 48884 - DNA, 22 bp, Artificial Sequence
  chemically synthesized
ctctcactagctgtggtgcttg

SEQ ID NO: 48885 - DNA, 22 bp, Artificial Sequence
  chemically synthesized
tcactagctgtggtgcttgaca

SEQ ID NO: 48886 - DNA, 22 bp, Artificial Sequence
  chemically synthesized
actagctgtggtgcttgacaag

SEQ ID NO: 48887 - DNA, 22 bp, Artificial Sequence
  chemically synthesized
gctgtggtgcttgacaagtcac

SEQ ID NO: 48888 - DNA, 22 bp, Artificial Sequence
  chemically synthesized
tggtgcttgacaagtcacttat

SEQ ID NO: 48889 - DNA, 22 bp, Artificial Sequence
  chemically synthesized
gacaagtcacttatccttgagc

SEQ ID NO: 48890 - DNA, 22 bp, Artificial Sequence
  chemically synthesized
acaagtcacttatccttgagcc

SEQ ID NO: 48891 - DNA, 22 bp, Artificial Sequence
  chemically synthesized
atccttgagcctccattgccta

SEQ ID NO: 48892 - DNA, 22 bp, Artificial Sequence
  chemically synthesized
tccttgagcctccattgcctaa

SEQ ID NO: 48893 - DNA, 22 bp, Artificial Sequence
  chemically synthesized
gagcctccattgcctaatcttt

SEQ ID NO: 48894 - DNA, 22 bp, Artificial Sequence
  chemically synthesized
agcctccattgcctaatcttta

SEQ ID NO: 48895 - DNA, 22 bp, Artificial Sequence
  chemically synthesized
cattgcctaatctttaaaaggg

SEQ ID NO: 48896 - DNA, 22 bp, Artificial Sequence
  chemically synthesized
cctaatctttaaaagggaggtg

SEQ ID NO: 48897 - DNA, 22 bp, Artificial Sequence
  chemically synthesized
atctttaaaagggaggtgacaa

SEQ ID NO: 48898 - DNA, 22 bp, Artificial Sequence
  chemically synthesized
taaaagggaggtgacaatcgtc

SEQ ID NO: 48899 - DNA, 22 bp, Artificial Sequence
  chemically synthesized
aaaagggaggtgacaatcgtcc

SEQ ID NO: 48900 - DNA, 22 bp, Artificial Sequence
  chemically synthesized
aaagggaggtgacaatcgtccc

SEQ ID NO: 48901 - DNA, 22 bp, Artificial Sequence
  chemically synthesized
cggctcagtggcagcagatggg

SEQ ID NO: 48902 - DNA, 22 bp, Artificial Sequence
  chemically synthesized
agtggcagcagatggggagatg

SEQ ID NO: 48903 - DNA, 22 bp, Artificial Sequence
  chemically synthesized
tgttgaccatgagtgaacttac

SEQ ID NO: 48904 - DNA, 22 bp, Artificial Sequence
  chemically synthesized
ttgaccatgagtgaacttacaa

SEQ ID NO: 48905 - DNA, 22 bp, Artificial Sequence
  chemically synthesized
accatgagtgaacttacaatgc

SEQ ID NO: 48906 - DNA, 22 bp, Artificial Sequence
  chemically synthesized
acaatgcaagccccggggggat

SEQ ID NO: 48907 - DNA, 22 bp, Artificial Sequence
  chemically synthesized
caatgcaagccccggggggatc

SEQ ID NO: 48908 - DNA, 22 bp, Artificial Sequence
  chemically synthesized
gcagttttgtccctgtctgcag

SEQ ID NO: 48909 - DNA, 22 bp, Artificial Sequence
  chemically synthesized
cagttttgtccctgtctgcagt

SEQ ID NO: 48910 - DNA, 22 bp, Artificial Sequence
  chemically synthesized
tgtccctgtctgcagtgtgacc

SEQ ID NO: 48911 - DNA, 22 bp, Artificial Sequence
  chemically synthesized
gtccctgtctgcagtgtgacct

SEQ ID NO: 48912 - DNA, 22 bp, Artificial Sequence
  chemically synthesized
tccctgtctgcagtgtgacctg

SEQ ID NO: 48913 - DNA, 22 bp, Artificial Sequence
  chemically synthesized
tctgcagtgtgacctgttggtg

SEQ ID NO: 48914 - DNA, 22 bp, Artificial Sequence
  chemically synthesized
cagtgtgacctgttggtgacat

SEQ ID NO: 48915 - DNA, 22 bp, Artificial Sequence
  chemically synthesized
ttggtgacattgtctttgctcc

SEQ ID NO: 48916 - DNA, 22 bp, Artificial Sequence
  chemically synthesized
gtgacattgtctttgctccaaa

SEQ ID NO: 48917 - DNA, 22 bp, Artificial Sequence
  chemically synthesized
tctttgctccaaaccacagctc

SEQ ID NO: 48918 - DNA, 22 bp, Artificial Sequence
  chemically synthesized
tgctccaaaccacagctcctgg

SEQ ID NO: 48919 - DNA, 22 bp, Artificial Sequence
  chemically synthesized
gctccaaaccacagctcctggg

SEQ ID NO: 48920 - DNA, 22 bp, Artificial Sequence
  chemically synthesized
ctccaaaccacagctcctgggg

SEQ ID NO: 48921 - DNA, 22 bp, Artificial Sequence
  chemically synthesized
caaaccacagctcctggggcag

SEQ ID NO: 48922 - DNA, 22 bp, Artificial Sequence
  chemically synthesized
ctggggcagaggggaaaattct

SEQ ID NO: 48923 - DNA, 22 bp, Artificial Sequence
  chemically synthesized
gggcagaggggaaaattctgcc

SEQ ID NO: 48924 - DNA, 22 bp, Artificial Sequence
  chemically synthesized
tgccactcacagctgcctgccc

SEQ ID NO: 48925 - DNA, 22 bp, Artificial Sequence
  chemically synthesized
ccactcacagctgcctgcccac

SEQ ID NO: 48926 - DNA, 22 bp, Artificial Sequence
  chemically synthesized
acagctgcctgcccacgcttct

SEQ ID NO: 48927 - DNA, 22 bp, Artificial Sequence
  chemically synthesized
cctgcccacgcttctgtctgag

SEQ ID NO: 48928 - DNA, 22 bp, Artificial Sequence
  chemically synthesized
cccacgcttctgtctgagtgtg

SEQ ID NO: 48929 - DNA, 22 bp, Artificial Sequence
  chemically synthesized
ctgtctgagtgtgctgggtggc

SEQ ID NO: 48930 - DNA, 22 bp, Artificial Sequence
  chemically synthesized
tgtctgagtgtgctgggtggca

SEQ ID NO: 48931 - DNA, 22 bp, Artificial Sequence
  chemically synthesized
tctgagtgtgctgggtggcagg

SEQ ID NO: 48932 - DNA, 22 bp, Artificial Sequence
  chemically synthesized
agtgtgctgggtggcaggatgg

SEQ ID NO: 48933 - DNA, 22 bp, Artificial Sequence
  chemically synthesized
ggtggcaggatggcaagtcctt

SEQ ID NO: 48934 - DNA, 22 bp, Artificial Sequence
  chemically synthesized
actcagctcagtatagccctct

SEQ ID NO: 48935 - DNA, 22 bp, Artificial Sequence
  chemically synthesized
ctcagctcagtatagccctctt

SEQ ID NO: 48936 - DNA, 22 bp, Artificial Sequence
  chemically synthesized
agctcagtatagccctcttcct

SEQ ID NO: 48937 - DNA, 22 bp, Artificial Sequence
  chemically synthesized
agtatagccctcttccttgttc

SEQ ID NO: 48938 - DNA, 22 bp, Artificial Sequence
  chemically synthesized
ttccttgttccctgagcctttg

SEQ ID NO: 48939 - DNA, 22 bp, Artificial Sequence
  chemically synthesized
ccttgttccctgagcctttgac

SEQ ID NO: 48940 - DNA, 22 bp, Artificial Sequence
  chemically synthesized
cttgttccctgagcctttgact

SEQ ID NO: 48941 - DNA, 22 bp, Artificial Sequence
  chemically synthesized
gttccctgagcctttgactttc

SEQ ID NO: 48942 - DNA, 22 bp, Artificial Sequence
  chemically synthesized
ttccctgagcctttgactttct

SEQ ID NO: 48943 - DNA, 22 bp, Artificial Sequence
  chemically synthesized
cctgagcctttgactttctcga

SEQ ID NO: 48944 - DNA, 22 bp, Artificial Sequence
  chemically synthesized
agcctttgactttctcgaggga

SEQ ID NO: 48945 - DNA, 22 bp, Artificial Sequence
  chemically synthesized
tgactttctcgagggatgttgt

SEQ ID NO: 48946 - DNA, 22 bp, Artificial Sequence
  chemically synthesized
gactttctcgagggatgttgtg

SEQ ID NO: 48947 - DNA, 22 bp, Artificial Sequence
  chemically synthesized
actttctcgagggatgttgtgg

SEQ ID NO: 48948 - DNA, 22 bp, Artificial Sequence
  chemically synthesized
tctcgagggatgttgtggggtt

SEQ ID NO: 48949 - DNA, 22 bp, Artificial Sequence
  chemically synthesized
ctcgagggatgttgtggggttg

SEQ ID NO: 48950 - DNA, 22 bp, Artificial Sequence
  chemically synthesized
tcgagggatgttgtggggttgt

SEQ ID NO: 48951 - DNA, 22 bp, Artificial Sequence
  chemically synthesized
gagggatgttgtggggttgtgg

SEQ ID NO: 48952 - DNA, 22 bp, Artificial Sequence
  chemically synthesized
tggggttgtggccaggataaga

SEQ ID NO: 48953 - DNA, 22 bp, Artificial Sequence
  chemically synthesized
tggccaggataagaaagggcat

SEQ ID NO: 48954 - DNA, 22 bp, Artificial Sequence
  chemically synthesized
caagttaccactgctccaaaac

SEQ ID NO: 48955 - DNA, 22 bp, Artificial Sequence
  chemically synthesized
aagttaccactgctccaaaaca

SEQ ID NO: 48956 - DNA, 22 bp, Artificial Sequence
  chemically synthesized
ccactgctccaaaacaactgtt

SEQ ID NO: 48957 - DNA, 22 bp, Artificial Sequence
  chemically synthesized
ctccaaaacaactgttctggaa

SEQ ID NO: 48958 - DNA, 22 bp, Artificial Sequence
  chemically synthesized
caaaacaactgttctggaaata

SEQ ID NO: 48959 - DNA, 22 bp, Artificial Sequence
  chemically synthesized
ttctggaaatagtgagtacccc

SEQ ID NO: 48960 - DNA, 22 bp, Artificial Sequence
  chemically synthesized
tggaaatagtgagtaccccatc

SEQ ID NO: 48961 - DNA, 22 bp, Artificial Sequence
  chemically synthesized
gaaatagtgagtaccccatcct

SEQ ID NO: 48962 - DNA, 22 bp, Artificial Sequence
  chemically synthesized
agaggtgagtaagcagaggctg

SEQ ID NO: 48963 - DNA, 22 bp, Artificial Sequence
  chemically synthesized
tatgaccacctgaaccaagccc

SEQ ID NO: 48964 - DNA, 22 bp, Artificial Sequence
  chemically synthesized
aaccaagcccttgaggatgttt

SEQ ID NO: 48965 - DNA, 22 bp, Artificial Sequence
  chemically synthesized
gaggatgtttcttctctggtgg

SEQ ID NO: 48966 - DNA, 22 bp, Artificial Sequence
  chemically synthesized
aggatgtttcttctctggtgga

SEQ ID NO: 48967 - DNA, 22 bp, Artificial Sequence
  chemically synthesized
cttctctggtggaagtttggaa

SEQ ID NO: 48968 - DNA, 22 bp, Artificial Sequence
  chemically synthesized
ttctctggtggaagtttggaac

SEQ ID NO: 48969 - DNA, 22 bp, Artificial Sequence
  chemically synthesized
ctctggtggaagtttggaacag

SEQ ID NO: 48970 - DNA, 22 bp, Artificial Sequence
  chemically synthesized
tctggtggaagtttggaacagg

SEQ ID NO: 48971 - DNA, 22 bp, Artificial Sequence
  chemically synthesized
tggtggaagtttggaacaggag

SEQ ID NO: 48972 - DNA, 22 bp, Artificial Sequence
  chemically synthesized
gtggaagtttggaacaggagcc

SEQ ID NO: 48973 - DNA, 22 bp, Artificial Sequence
  chemically synthesized
ggaacaggagcctcctcaagtt

SEQ ID NO: 48974 - DNA, 22 bp, Artificial Sequence
  chemically synthesized
gaacaggagcctcctcaagttc

SEQ ID NO: 48975 - DNA, 22 bp, Artificial Sequence
  chemically synthesized
ctcaagttcatttattcattca

SEQ ID NO: 48976 - DNA, 22 bp, Artificial Sequence
  chemically synthesized
aagttcatttattcattcattc

SEQ ID NO: 48977 - DNA, 22 bp, Artificial Sequence
  chemically synthesized
atttattcattcattcaatggt

SEQ ID NO: 48978 - DNA, 22 bp, Artificial Sequence
  chemically synthesized
attcattcattcaatggttatt

SEQ ID NO: 48979 - DNA, 22 bp, Artificial Sequence
  chemically synthesized
ttcattcattcaatggttattt

SEQ ID NO: 48980 - DNA, 22 bp, Artificial Sequence
  chemically synthesized
attcattcaatggttattttgt

SEQ ID NO: 48981 - DNA, 22 bp, Artificial Sequence
  chemically synthesized
attcaatggttattttgtggga

SEQ ID NO: 48982 - DNA, 22 bp, Artificial Sequence
  chemically synthesized
aatggttattttgtgggaatcg

SEQ ID NO: 48983 - DNA, 22 bp, Artificial Sequence
  chemically synthesized
ttttgtgggaatcgaatttaga

SEQ ID NO: 48984 - DNA, 22 bp, Artificial Sequence
  chemically synthesized
tgtgggaatcgaatttagaatg

SEQ ID NO: 48985 - DNA, 22 bp, Artificial Sequence
  chemically synthesized
gtgggaatcgaatttagaatga

SEQ ID NO: 48986 - DNA, 22 bp, Artificial Sequence
  chemically synthesized
tgggaatcgaatttagaatgaa

SEQ ID NO: 48987 - DNA, 22 bp, Artificial Sequence
  chemically synthesized
agaatgaaaatattttttggca

SEQ ID NO: 48988 - DNA, 22 bp, Artificial Sequence
  chemically synthesized
gaatgaaaatattttttggcaa

SEQ ID NO: 48989 - DNA, 22 bp, Artificial Sequence
  chemically synthesized
tttggcaagcagaaaataattt

SEQ ID NO: 48990 - DNA, 22 bp, Artificial Sequence
  chemically synthesized
ttggcaagcagaaaataatttt

SEQ ID NO: 48991 - DNA, 22 bp, Artificial Sequence
  chemically synthesized
tggcaagcagaaaataattttt

SEQ ID NO: 48992 - DNA, 22 bp, Artificial Sequence
  chemically synthesized
ggcaagcagaaaataattttta

SEQ ID NO: 48993 - DNA, 22 bp, Artificial Sequence
  chemically synthesized
gcaagcagaaaataatttttag

SEQ ID NO: 48994 - DNA, 22 bp, Artificial Sequence
  chemically synthesized
ttagaccaatccttttctttta

SEQ ID NO: 48995 - DNA, 22 bp, Artificial Sequence
  chemically synthesized
tagaccaatccttttcttttag

SEQ ID NO: 48996 - DNA, 22 bp, Artificial Sequence
  chemically synthesized
agaccaatccttttcttttagt

SEQ ID NO: 48997 - DNA, 22 bp, Artificial Sequence
  chemically synthesized
gaccaatccttttcttttagtc

SEQ ID NO: 48998 - DNA, 22 bp, Artificial Sequence
  chemically synthesized
ttcttttagtcatgagaaactg

SEQ ID NO: 48999 - DNA, 22 bp, Artificial Sequence
  chemically synthesized
tcttttagtcatgagaaactga

SEQ ID NO: 49000 - DNA, 22 bp, Artificial Sequence
  chemically synthesized
cttttagtcatgagaaactgag

SEQ ID NO: 49001 - DNA, 22 bp, Artificial Sequence
  chemically synthesized
ttttagtcatgagaaactgagg

SEQ ID NO: 49002 - DNA, 22 bp, Artificial Sequence
  chemically synthesized
ttagtcatgagaaactgaggcc

SEQ ID NO: 49003 - DNA, 22 bp, Artificial Sequence
  chemically synthesized
tagtcatgagaaactgaggccc

SEQ ID NO: 49004 - DNA, 22 bp, Artificial Sequence
  chemically synthesized
agtcatgagaaactgaggccca

SEQ ID NO: 49005 - DNA, 22 bp, Artificial Sequence
  chemically synthesized
gtcatgagaaactgaggcccag

SEQ ID NO: 49006 - DNA, 22 bp, Artificial Sequence
  chemically synthesized
aggcccagagagaggaggtcac

SEQ ID NO: 49007 - DNA, 22 bp, Artificial Sequence
  chemically synthesized
gaactgggtttccagaactgac

SEQ ID NO: 49008 - DNA, 22 bp, Artificial Sequence
  chemically synthesized
ggtttccagaactgacactcca

SEQ ID NO: 49009 - DNA, 22 bp, Artificial Sequence
  chemically synthesized
ccagaactgacactccactgca

SEQ ID NO: 49010 - DNA, 22 bp, Artificial Sequence
  chemically synthesized
cagaactgacactccactgcac

SEQ ID NO: 49011 - DNA, 22 bp, Artificial Sequence
  chemically synthesized
acactccactgcacagagtact

SEQ ID NO: 49012 - DNA, 22 bp, Artificial Sequence
  chemically synthesized
cactgcacagagtactctccca

SEQ ID NO: 49013 - DNA, 22 bp, Artificial Sequence
  chemically synthesized
cacagagtactctcccaattca

SEQ ID NO: 49014 - DNA, 22 bp, Artificial Sequence
  chemically synthesized
tcccaattcattcaatttttat

SEQ ID NO: 49015 - DNA, 22 bp, Artificial Sequence
  chemically synthesized
ccaattcattcaatttttattt

SEQ ID NO: 49016 - DNA, 22 bp, Artificial Sequence
  chemically synthesized
attcaatttttatttagcggaa

SEQ ID NO: 49017 - DNA, 22 bp, Artificial Sequence
  chemically synthesized
aatttttatttagcggaaggca

SEQ ID NO: 49018 - DNA, 22 bp, Artificial Sequence
  chemically synthesized
ttatttagcggaaggcattttc

SEQ ID NO: 49019 - DNA, 22 bp, Artificial Sequence
  chemically synthesized
tatttagcggaaggcattttca

SEQ ID NO: 49020 - DNA, 22 bp, Artificial Sequence
  chemically synthesized
atttagcggaaggcattttcag

SEQ ID NO: 49021 - DNA, 22 bp, Artificial Sequence
  chemically synthesized
tttagcggaaggcattttcaga

SEQ ID NO: 49022 - DNA, 22 bp, Artificial Sequence
  chemically synthesized
agcggaaggcattttcagatgg

SEQ ID NO: 49023 - DNA, 22 bp, Artificial Sequence
  chemically synthesized
gcggaaggcattttcagatggg

SEQ ID NO: 49024 - DNA, 22 bp, Artificial Sequence
  chemically synthesized
tcagatgggtctttgaagcatt

SEQ ID NO: 49025 - DNA, 22 bp, Artificial Sequence
  chemically synthesized
cagatgggtctttgaagcatta

SEQ ID NO: 49026 - DNA, 22 bp, Artificial Sequence
  chemically synthesized
agatgggtctttgaagcattag

SEQ ID NO: 49027 - DNA, 22 bp, Artificial Sequence
  chemically synthesized
tgaagcattagtaggagttcag

SEQ ID NO: 49028 - DNA, 22 bp, Artificial Sequence
  chemically synthesized
gaagcattagtaggagttcagc

SEQ ID NO: 49029 - DNA, 22 bp, Artificial Sequence
  chemically synthesized
aagcattagtaggagttcagcg

SEQ ID NO: 49030 - DNA, 22 bp, Artificial Sequence
  chemically synthesized
gtaggagttcagcgatgatggt

SEQ ID NO: 49031 - DNA, 22 bp, Artificial Sequence
  chemically synthesized
agcgatgatggtgtcatgagaa

SEQ ID NO: 49032 - DNA, 22 bp, Artificial Sequence
  chemically synthesized
tattctaggattaggaggtacc

SEQ ID NO: 49033 - DNA, 22 bp, Artificial Sequence
  chemically synthesized
attctaggattaggaggtacca

SEQ ID NO: 49034 - DNA, 22 bp, Artificial Sequence
  chemically synthesized
ttctaggattaggaggtaccat

SEQ ID NO: 49035 - DNA, 22 bp, Artificial Sequence
  chemically synthesized
taggattaggaggtaccatgaa

SEQ ID NO: 49036 - DNA, 22 bp, Artificial Sequence
  chemically synthesized
ggattaggaggtaccatgaaca

SEQ ID NO: 49037 - DNA, 22 bp, Artificial Sequence
  chemically synthesized
ggaggtaccatgaacaaagata

SEQ ID NO: 49038 - DNA, 22 bp, Artificial Sequence
  chemically synthesized
ggaaaaccagaggtggaagata

SEQ ID NO: 49039 - DNA, 22 bp, Artificial Sequence
  chemically synthesized
tttttcttttttttttgagatg

SEQ ID NO: 49040 - DNA, 22 bp, Artificial Sequence
  chemically synthesized
tttcttttttttttgagatgga

SEQ ID NO: 49041 - DNA, 22 bp, Artificial Sequence
  chemically synthesized
ttcttttttttttgagatggag

SEQ ID NO: 49042 - DNA, 22 bp, Artificial Sequence
  chemically synthesized
tcttttttttttgagatggagt

SEQ ID NO: 49043 - DNA, 22 bp, Artificial Sequence
  chemically synthesized
cttttttttttgagatggagtt

SEQ ID NO: 49044 - DNA, 22 bp, Artificial Sequence
  chemically synthesized
ttttttttttgagatggagttt

SEQ ID NO: 49045 - DNA, 22 bp, Artificial Sequence
  chemically synthesized
ttttttttgagatggagtttcg

SEQ ID NO: 49046 - DNA, 22 bp, Artificial Sequence
  chemically synthesized
tttttttgagatggagtttcgc

SEQ ID NO: 49047 - DNA, 22 bp, Artificial Sequence
  chemically synthesized
ttttttgagatggagtttcgct

SEQ ID NO: 49048 - DNA, 22 bp, Artificial Sequence
  chemically synthesized
tttttgagatggagtttcgctc

SEQ ID NO: 49049 - DNA, 22 bp, Artificial Sequence
  chemically synthesized
ttttgagatggagtttcgctct

SEQ ID NO: 49050 - DNA, 22 bp, Artificial Sequence
  chemically synthesized
tttgagatggagtttcgctctt

SEQ ID NO: 49051 - DNA, 22 bp, Artificial Sequence
  chemically synthesized
ttgagatggagtttcgctcttg

SEQ ID NO: 49052 - DNA, 22 bp, Artificial Sequence
  chemically synthesized
tgagatggagtttcgctcttgt

SEQ ID NO: 49053 - DNA, 22 bp, Artificial Sequence
  chemically synthesized
gagatggagtttcgctcttgtt

SEQ ID NO: 49054 - DNA, 22 bp, Artificial Sequence
  chemically synthesized
agatggagtttcgctcttgttg

SEQ ID NO: 49055 - DNA, 22 bp, Artificial Sequence
  chemically synthesized
cgctcttgttgcccaggctgga

SEQ ID NO: 49056 - DNA, 22 bp, Artificial Sequence
  chemically synthesized
gctcttgttgcccaggctggag

SEQ ID NO: 49057 - DNA, 22 bp, Artificial Sequence
  chemically synthesized
ttgttgcccaggctggagtgca

SEQ ID NO: 49058 - DNA, 22 bp, Artificial Sequence
  chemically synthesized
gttgcccaggctggagtgcaat

SEQ ID NO: 49059 - DNA, 22 bp, Artificial Sequence
  chemically synthesized
ttgcccaggctggagtgcaatg

SEQ ID NO: 49060 - DNA, 22 bp, Artificial Sequence
  chemically synthesized
cccaggctggagtgcaatggtg

SEQ ID NO: 49061 - DNA, 22 bp, Artificial Sequence
  chemically synthesized
gagtgcaatggtgcagtctcag

SEQ ID NO: 49062 - DNA, 22 bp, Artificial Sequence
  chemically synthesized
agctcactgcaacatctgtctc

SEQ ID NO: 49063 - DNA, 22 bp, Artificial Sequence
  chemically synthesized
actgcaacatctgtctcccggg

SEQ ID NO: 49064 - DNA, 22 bp, Artificial Sequence
  chemically synthesized
caacatctgtctcccgggttca

SEQ ID NO: 49065 - DNA, 22 bp, Artificial Sequence
  chemically synthesized
tctcccgggttcaagtggttct

SEQ ID NO: 49066 - DNA, 22 bp, Artificial Sequence
  chemically synthesized
ccgggttcaagtggttctcctg

SEQ ID NO: 49067 - DNA, 22 bp, Artificial Sequence
  chemically synthesized
aagtggttctcctgcctcagcc

SEQ ID NO: 49068 - DNA, 22 bp, Artificial Sequence
  chemically synthesized
tcctgcctcagcctcccaagaa

SEQ ID NO: 49069 - DNA, 22 bp, Artificial Sequence
  chemically synthesized
ctgcctcagcctcccaagaagc

SEQ ID NO: 49070 - DNA, 22 bp, Artificial Sequence
  chemically synthesized
cctcagcctcccaagaagctgg

SEQ ID NO: 49071 - DNA, 22 bp, Artificial Sequence
  chemically synthesized
agcctcccaagaagctgggatt

SEQ ID NO: 49072 - DNA, 22 bp, Artificial Sequence
  chemically synthesized
ccaagaagctgggattacaggt

SEQ ID NO: 49073 - DNA, 22 bp, Artificial Sequence
  chemically synthesized
ggattacaggtacctgccacca

SEQ ID NO: 49074 - DNA, 22 bp, Artificial Sequence
  chemically synthesized
caggtacctgccaccacgcccg

SEQ ID NO: 49075 - DNA, 22 bp, Artificial Sequence
  chemically synthesized
ccaccacgcccggctaattttt

SEQ ID NO: 49076 - DNA, 22 bp, Artificial Sequence
  chemically synthesized
atttttgtatttttagtagaga

SEQ ID NO: 49077 - DNA, 22 bp, Artificial Sequence
  chemically synthesized
ttgtatttttagtagagaaggg

SEQ ID NO: 49078 - DNA, 22 bp, Artificial Sequence
  chemically synthesized
tgtatttttagtagagaagggg

SEQ ID NO: 49079 - DNA, 22 bp, Artificial Sequence
  chemically synthesized
gtatttttagtagagaaggggt

SEQ ID NO: 49080 - DNA, 22 bp, Artificial Sequence
  chemically synthesized
tatttttagtagagaaggggtt

SEQ ID NO: 49081 - DNA, 22 bp, Artificial Sequence
  chemically synthesized
ttagtagagaaggggtttcacc

SEQ ID NO: 49082 - DNA, 22 bp, Artificial Sequence
  chemically synthesized
tagtagagaaggggtttcacca

SEQ ID NO: 49083 - DNA, 22 bp, Artificial Sequence
  chemically synthesized
agtagagaaggggtttcaccac

SEQ ID NO: 49084 - DNA, 22 bp, Artificial Sequence
  chemically synthesized
gtagagaaggggtttcaccacg

SEQ ID NO: 49085 - DNA, 22 bp, Artificial Sequence
  chemically synthesized
caccacgttggccaggctagtc

SEQ ID NO: 49086 - DNA, 22 bp, Artificial Sequence
  chemically synthesized
accacgttggccaggctagtcg

SEQ ID NO: 49087 - DNA, 22 bp, Artificial Sequence
  chemically synthesized
gccaggctagtcgcaaactcct

SEQ ID NO: 49088 - DNA, 22 bp, Artificial Sequence
  chemically synthesized
gtcgcaaactcctgacctcctc

SEQ ID NO: 49089 - DNA, 22 bp, Artificial Sequence
  chemically synthesized
ctgacctcctcagtggatccga

SEQ ID NO: 49090 - DNA, 22 bp, Artificial Sequence
  chemically synthesized
acctcctcagtggatccgagga

SEQ ID NO: 49091 - DNA, 22 bp, Artificial Sequence
  chemically synthesized
ctcagtggatccgaggaggtga

SEQ ID NO: 49092 - DNA, 22 bp, Artificial Sequence
  chemically synthesized
agtggatccgaggaggtgatcc

SEQ ID NO: 49093 - DNA, 22 bp, Artificial Sequence
  chemically synthesized
ccgcctcagcctcccaaagtgc

SEQ ID NO: 49094 - DNA, 22 bp, Artificial Sequence
  chemically synthesized
agcctcccaaagtgctcgaatt

SEQ ID NO: 49095 - DNA, 22 bp, Artificial Sequence
  chemically synthesized
ccaaagtgctcgaattacaggt

SEQ ID NO: 49096 - DNA, 22 bp, Artificial Sequence
  chemically synthesized
gaattacaggtgtgagccacca

SEQ ID NO: 49097 - DNA, 22 bp, Artificial Sequence
  chemically synthesized
caggtgtgagccaccacgcctg

SEQ ID NO: 49098 - DNA, 22 bp, Artificial Sequence
  chemically synthesized
gcctccacagttctttatccac

SEQ ID NO: 49099 - DNA, 22 bp, Artificial Sequence
  chemically synthesized
cacagttctttatccaccgtct

SEQ ID NO: 49100 - DNA, 22 bp, Artificial Sequence
  chemically synthesized
tttatccaccgtctgaaatgta

SEQ ID NO: 49101 - DNA, 22 bp, Artificial Sequence
  chemically synthesized
tatccaccgtctgaaatgtaaa

SEQ ID NO: 49102 - DNA, 22 bp, Artificial Sequence
  chemically synthesized
atccaccgtctgaaatgtaaaa

SEQ ID NO: 49103 - DNA, 22 bp, Artificial Sequence
  chemically synthesized
tccaccgtctgaaatgtaaaat

SEQ ID NO: 49104 - DNA, 22 bp, Artificial Sequence
  chemically synthesized
aaatgtaaaatgttacgaaaac

SEQ ID NO: 49105 - DNA, 22 bp, Artificial Sequence
  chemically synthesized
cgaaaaccaaaagttttttttg

SEQ ID NO: 49106 - DNA, 22 bp, Artificial Sequence
  chemically synthesized
tttttgtgatttatttgatggt

SEQ ID NO: 49107 - DNA, 22 bp, Artificial Sequence
  chemically synthesized
ttttgtgatttatttgatggta

SEQ ID NO: 49108 - DNA, 22 bp, Artificial Sequence
  chemically synthesized
tttgtgatttatttgatggtag

SEQ ID NO: 49109 - DNA, 22 bp, Artificial Sequence
  chemically synthesized
ttgtgatttatttgatggtagc

SEQ ID NO: 49110 - DNA, 22 bp, Artificial Sequence
  chemically synthesized
tgtgatttatttgatggtagca

SEQ ID NO: 49111 - DNA, 22 bp, Artificial Sequence
  chemically synthesized
gtgatttatttgatggtagcac

SEQ ID NO: 49112 - DNA, 22 bp, Artificial Sequence
  chemically synthesized
tgatttatttgatggtagcacc

SEQ ID NO: 49113 - DNA, 22 bp, Artificial Sequence
  chemically synthesized
atttgatggtagcacctgacgt

SEQ ID NO: 49114 - DNA, 22 bp, Artificial Sequence
  chemically synthesized
tttgatggtagcacctgacgtg

SEQ ID NO: 49115 - DNA, 22 bp, Artificial Sequence
  chemically synthesized
gatggtagcacctgacgtgaac

SEQ ID NO: 49116 - DNA, 22 bp, Artificial Sequence
  chemically synthesized
atggtagcacctgacgtgaact

SEQ ID NO: 49117 - DNA, 22 bp, Artificial Sequence
  chemically synthesized
acgtgaactgacatgagattat

SEQ ID NO: 49118 - DNA, 22 bp, Artificial Sequence
  chemically synthesized
acatgagattatttttaattta

SEQ ID NO: 49119 - DNA, 22 bp, Artificial Sequence
  chemically synthesized
tttttaatttagttgtgtgaat

SEQ ID NO: 49120 - DNA, 22 bp, Artificial Sequence
  chemically synthesized
ttaatttagttgtgtgaatatg

SEQ ID NO: 49121 - DNA, 22 bp, Artificial Sequence
  chemically synthesized
taatttagttgtgtgaatatgc

SEQ ID NO: 49122 - DNA, 22 bp, Artificial Sequence
  chemically synthesized
aatttagttgtgtgaatatgca

SEQ ID NO: 49123 - DNA, 22 bp, Artificial Sequence
  chemically synthesized
atttagttgtgtgaatatgcat

SEQ ID NO: 49124 - DNA, 22 bp, Artificial Sequence
  chemically synthesized
agttgtgtgaatatgcatattc

SEQ ID NO: 49125 - DNA, 22 bp, Artificial Sequence
  chemically synthesized
gttgtgtgaatatgcatattca

SEQ ID NO: 49126 - DNA, 22 bp, Artificial Sequence
  chemically synthesized
tgtgaatatgcatattcatata

SEQ ID NO: 49127 - DNA, 22 bp, Artificial Sequence
  chemically synthesized
atatattttgctgcatagatta

SEQ ID NO: 49128 - DNA, 22 bp, Artificial Sequence
  chemically synthesized
tgctgcatagattacagtatgc

SEQ ID NO: 49129 - DNA, 22 bp, Artificial Sequence
  chemically synthesized
gctgcatagattacagtatgca

SEQ ID NO: 49130 - DNA, 22 bp, Artificial Sequence
  chemically synthesized
ctgcatagattacagtatgcag

SEQ ID NO: 49131 - DNA, 22 bp, Artificial Sequence
  chemically synthesized
catagattacagtatgcagctc

SEQ ID NO: 49132 - DNA, 22 bp, Artificial Sequence
  chemically synthesized
cagtatgcagctccagattctt

SEQ ID NO: 49133 - DNA, 22 bp, Artificial Sequence
  chemically synthesized
cagattcttccaagcagactct

SEQ ID NO: 49134 - DNA, 22 bp, Artificial Sequence
  chemically synthesized
ttccaagcagactctgattgcc

SEQ ID NO: 49135 - DNA, 22 bp, Artificial Sequence
  chemically synthesized
ccaagcagactctgattgccca

SEQ ID NO: 49136 - DNA, 22 bp, Artificial Sequence
  chemically synthesized
caagcagactctgattgcccat

SEQ ID NO: 49137 - DNA, 22 bp, Artificial Sequence
  chemically synthesized
tgattgcccattactgcctttc

SEQ ID NO: 49138 - DNA, 22 bp, Artificial Sequence
  chemically synthesized
attgcccattactgcctttcta

SEQ ID NO: 49139 - DNA, 22 bp, Artificial Sequence
  chemically synthesized
cccattactgcctttctaaaat

SEQ ID NO: 49140 - DNA, 22 bp, Artificial Sequence
  chemically synthesized
ctgcctttctaaaatccaaaca

SEQ ID NO: 49141 - DNA, 22 bp, Artificial Sequence
  chemically synthesized
cctttctaaaatccaaacaagt

SEQ ID NO: 49142 - DNA, 22 bp, Artificial Sequence
  chemically synthesized
tctaaaatccaaacaagttctg

SEQ ID NO: 49143 - DNA, 22 bp, Artificial Sequence
  chemically synthesized
ctaaaatccaaacaagttctga

SEQ ID NO: 49144 - DNA, 22 bp, Artificial Sequence
  chemically synthesized
taaaatccaaacaagttctgag

SEQ ID NO: 49145 - DNA, 22 bp, Artificial Sequence
  chemically synthesized
aaatccaaacaagttctgaggt

SEQ ID NO: 49146 - DNA, 22 bp, Artificial Sequence
  chemically synthesized
tgaggttcaaaaccgttttggc

SEQ ID NO: 49147 - DNA, 22 bp, Artificial Sequence
  chemically synthesized
aggttcaaaaccgttttggccc

SEQ ID NO: 49148 - DNA, 22 bp, Artificial Sequence
  chemically synthesized
aaaaccgttttggccctaaggc

SEQ ID NO: 49149 - DNA, 22 bp, Artificial Sequence
  chemically synthesized
tggccctaaggctttgggtaaa

SEQ ID NO: 49150 - DNA, 22 bp, Artificial Sequence
  chemically synthesized
ggccctaaggctttgggtaaag

SEQ ID NO: 49151 - DNA, 22 bp, Artificial Sequence
  chemically synthesized
gccctaaggctttgggtaaagg

SEQ ID NO: 49152 - DNA, 22 bp, Artificial Sequence
  chemically synthesized
aggctttgggtaaagggggtgg

SEQ ID NO: 49153 - DNA, 22 bp, Artificial Sequence
  chemically synthesized
tgggtaaagggggtggactctg

SEQ ID NO: 49154 - DNA, 22 bp, Artificial Sequence
  chemically synthesized
gggtaaagggggtggactctgt

SEQ ID NO: 49155 - DNA, 22 bp, Artificial Sequence
  chemically synthesized
ggtaaagggggtggactctgtt

SEQ ID NO: 49156 - DNA, 22 bp, Artificial Sequence
  chemically synthesized
tgttctactctgactggagtcc

SEQ ID NO: 49157 - DNA, 22 bp, Artificial Sequence
  chemically synthesized
ttctactctgactggagtccaa

SEQ ID NO: 49158 - DNA, 22 bp, Artificial Sequence
  chemically synthesized
tactctgactggagtccaagat

SEQ ID NO: 49159 - DNA, 22 bp, Artificial Sequence
  chemically synthesized
ctctgactggagtccaagatgc

SEQ ID NO: 49160 - DNA, 22 bp, Artificial Sequence
  chemically synthesized
tgactggagtccaagatgcata

SEQ ID NO: 49161 - DNA, 22 bp, Artificial Sequence
  chemically synthesized
actggagtccaagatgcatata

SEQ ID NO: 49162 - DNA, 22 bp, Artificial Sequence
  chemically synthesized
gagtccaagatgcatatataca

SEQ ID NO: 49163 - DNA, 22 bp, Artificial Sequence
  chemically synthesized
caaggtaggttgaggtaggggc

SEQ ID NO: 49164 - DNA, 22 bp, Artificial Sequence
  chemically synthesized
aggtaggggccaaggaggagca

SEQ ID NO: 49165 - DNA, 22 bp, Artificial Sequence
  chemically synthesized
ggacttgattcatgaggctgtg

SEQ ID NO: 49166 - DNA, 22 bp, Artificial Sequence
  chemically synthesized
gacttgattcatgaggctgtgg

SEQ ID NO: 49167 - DNA, 22 bp, Artificial Sequence
  chemically synthesized
gattcatgaggctgtggggagc

SEQ ID NO: 49168 - DNA, 22 bp, Artificial Sequence
  chemically synthesized
attcatgaggctgtggggagcc

SEQ ID NO: 49169 - DNA, 22 bp, Artificial Sequence
  chemically synthesized
atgaggctgtggggagccagtg

SEQ ID NO: 49170 - DNA, 22 bp, Artificial Sequence
  chemically synthesized
tggggagccagtgaaggttctt

SEQ ID NO: 49171 - DNA, 22 bp, Artificial Sequence
  chemically synthesized
ttaagcaggtatgtctgcctga

SEQ ID NO: 49172 - DNA, 22 bp, Artificial Sequence
  chemically synthesized
aagcaggtatgtctgcctgaga

SEQ ID NO: 49173 - DNA, 22 bp, Artificial Sequence
  chemically synthesized
agcaggtatgtctgcctgagag

SEQ ID NO: 49174 - DNA, 22 bp, Artificial Sequence
  chemically synthesized
cctgagagcagttggagcagac

SEQ ID NO: 49175 - DNA, 22 bp, Artificial Sequence
  chemically synthesized
agagcagttggagcagacaaga

SEQ ID NO: 49176 - DNA, 22 bp, Artificial Sequence
  chemically synthesized
gagcagacaagagctaaaaacc

SEQ ID NO: 49177 - DNA, 22 bp, Artificial Sequence
  chemically synthesized
aaaaccaaacaaatcaccatag

SEQ ID NO: 49178 - DNA, 22 bp, Artificial Sequence
  chemically synthesized
ctataatttgtttgtcccctcc

SEQ ID NO: 49179 - DNA, 22 bp, Artificial Sequence
  chemically synthesized
taatttgtttgtcccctccaaa

SEQ ID NO: 49180 - DNA, 22 bp, Artificial Sequence
  chemically synthesized
gtttgtcccctccaaatctcat

SEQ ID NO: 49181 - DNA, 22 bp, Artificial Sequence
  chemically synthesized
tttgtcccctccaaatctcatg

SEQ ID NO: 49182 - DNA, 22 bp, Artificial Sequence
  chemically synthesized
gtcccctccaaatctcatgtgg

SEQ ID NO: 49183 - DNA, 22 bp, Artificial Sequence
  chemically synthesized
tcccctccaaatctcatgtgga

SEQ ID NO: 49184 - DNA, 22 bp, Artificial Sequence
  chemically synthesized
caaatctcatgtggaaatttgg

SEQ ID NO: 49185 - DNA, 22 bp, Artificial Sequence
  chemically synthesized
atgtggaaatttggtcctcagt

SEQ ID NO: 49186 - DNA, 22 bp, Artificial Sequence
  chemically synthesized
ggtcctcagtgttggaagtggg

SEQ ID NO: 49187 - DNA, 22 bp, Artificial Sequence
  chemically synthesized
gtcctcagtgttggaagtgggg

SEQ ID NO: 49188 - DNA, 22 bp, Artificial Sequence
  chemically synthesized
agtgttggaagtggggcctaat

SEQ ID NO: 49189 - DNA, 22 bp, Artificial Sequence
  chemically synthesized
gaagtggggcctaatgggaggt

SEQ ID NO: 49190 - DNA, 22 bp, Artificial Sequence
  chemically synthesized
atgggaggtgtttgggtcatgg

SEQ ID NO: 49191 - DNA, 22 bp, Artificial Sequence
  chemically synthesized
gggtcatgggggaggaacccct

SEQ ID NO: 49192 - DNA, 22 bp, Artificial Sequence
  chemically synthesized
ggtcatgggggaggaacccctg

SEQ ID NO: 49193 - DNA, 22 bp, Artificial Sequence
  chemically synthesized
tgaaaggcttggtgccgtcctt

SEQ ID NO: 49194 - DNA, 22 bp, Artificial Sequence
  chemically synthesized
ggtgccgtccttgtgataatga

SEQ ID NO: 49195 - DNA, 22 bp, Artificial Sequence
  chemically synthesized
gtgccgtccttgtgataatgag

SEQ ID NO: 49196 - DNA, 22 bp, Artificial Sequence
  chemically synthesized
gtgataatgagtaagttctccc

SEQ ID NO: 49197 - DNA, 22 bp, Artificial Sequence
  chemically synthesized
tgataatgagtaagttctcccg

SEQ ID NO: 49198 - DNA, 22 bp, Artificial Sequence
  chemically synthesized
tcccgctatgatttcccttgaa

SEQ ID NO: 49199 - DNA, 22 bp, Artificial Sequence
  chemically synthesized
ccgctatgatttcccttgaagg

SEQ ID NO: 49200 - DNA, 22 bp, Artificial Sequence
  chemically synthesized
tgatttcccttgaaggctgatt

SEQ ID NO: 49201 - DNA, 22 bp, Artificial Sequence
  chemically synthesized
cccttgaaggctgattattaaa

SEQ ID NO: 49202 - DNA, 22 bp, Artificial Sequence
  chemically synthesized
ccttgaaggctgattattaaaa

SEQ ID NO: 49203 - DNA, 22 bp, Artificial Sequence
  chemically synthesized
gaaggctgattattaaaaagag

SEQ ID NO: 49204 - DNA, 22 bp, Artificial Sequence
  chemically synthesized
aaggctgattattaaaaagagc

SEQ ID NO: 49205 - DNA, 22 bp, Artificial Sequence
  chemically synthesized
attattaaaaagagcttggcac

SEQ ID NO: 49206 - DNA, 22 bp, Artificial Sequence
  chemically synthesized
ttaaaaagagcttggcacctcc

SEQ ID NO: 49207 - DNA, 22 bp, Artificial Sequence
  chemically synthesized
aaaagagcttggcacctccctc

SEQ ID NO: 49208 - DNA, 22 bp, Artificial Sequence
  chemically synthesized
ggcacctccctctcttctctct

SEQ ID NO: 49209 - DNA, 22 bp, Artificial Sequence
  chemically synthesized
gcacctccctctcttctctctt

SEQ ID NO: 49210 - DNA, 22 bp, Artificial Sequence
  chemically synthesized
cctctcttctctcttgcttctt

SEQ ID NO: 49211 - DNA, 22 bp, Artificial Sequence
  chemically synthesized
tcttctctcttgcttcttctct

SEQ ID NO: 49212 - DNA, 22 bp, Artificial Sequence
  chemically synthesized
ttctctcttgcttcttctcttg

SEQ ID NO: 49213 - DNA, 22 bp, Artificial Sequence
  chemically synthesized
ctctcttgcttcttctcttgcc

SEQ ID NO: 49214 - DNA, 22 bp, Artificial Sequence
  chemically synthesized
tctcttgcttcttctcttgcca

SEQ ID NO: 49215 - DNA, 22 bp, Artificial Sequence
  chemically synthesized
tcttgcttcttctcttgccatg

SEQ ID NO: 49216 - DNA, 22 bp, Artificial Sequence
  chemically synthesized
ttgcttcttctcttgccatgtg

SEQ ID NO: 49217 - DNA, 22 bp, Artificial Sequence
  chemically synthesized
gcttcttctcttgccatgtgat

SEQ ID NO: 49218 - DNA, 22 bp, Artificial Sequence
  chemically synthesized
cttcttctcttgccatgtgatt

SEQ ID NO: 49219 - DNA, 22 bp, Artificial Sequence
  chemically synthesized
cttctcttgccatgtgattgat

SEQ ID NO: 49220 - DNA, 22 bp, Artificial Sequence
  chemically synthesized
ttctcttgccatgtgattgatc

SEQ ID NO: 49221 - DNA, 22 bp, Artificial Sequence
  chemically synthesized
ctcttgccatgtgattgatctc

SEQ ID NO: 49222 - DNA, 22 bp, Artificial Sequence
  chemically synthesized
tcttgccatgtgattgatctct

SEQ ID NO: 49223 - DNA, 22 bp, Artificial Sequence
  chemically synthesized
ttgccatgtgattgatctctgc

SEQ ID NO: 49224 - DNA, 22 bp, Artificial Sequence
  chemically synthesized
gccatgtgattgatctctgcac

SEQ ID NO: 49225 - DNA, 22 bp, Artificial Sequence
  chemically synthesized
ccatgtgattgatctctgcaca

SEQ ID NO: 49226 - DNA, 22 bp, Artificial Sequence
  chemically synthesized
atctctgcacatgtaggctccc

SEQ ID NO: 49227 - DNA, 22 bp, Artificial Sequence
  chemically synthesized
tgcacatgtaggctccccttca

SEQ ID NO: 49228 - DNA, 22 bp, Artificial Sequence
  chemically synthesized
cacatgtaggctccccttcacc

SEQ ID NO: 49229 - DNA, 22 bp, Artificial Sequence
  chemically synthesized
cccttcaccttctgccatcagt

SEQ ID NO: 49230 - DNA, 22 bp, Artificial Sequence
  chemically synthesized
caccttctgccatcagtgaaag

SEQ ID NO: 49231 - DNA, 22 bp, Artificial Sequence
  chemically synthesized
accttctgccatcagtgaaagc

SEQ ID NO: 49232 - DNA, 22 bp, Artificial Sequence
  chemically synthesized
ctgccatcagtgaaagcagctt

SEQ ID NO: 49233 - DNA, 22 bp, Artificial Sequence
  chemically synthesized
tgccatcagtgaaagcagctta

SEQ ID NO: 49234 - DNA, 22 bp, Artificial Sequence
  chemically synthesized
ccatcagtgaaagcagcttaag

SEQ ID NO: 49235 - DNA, 22 bp, Artificial Sequence
  chemically synthesized
aaggccctcaccagaagcagat

SEQ ID NO: 49236 - DNA, 22 bp, Artificial Sequence
  chemically synthesized
aggccctcaccagaagcagatg

SEQ ID NO: 49237 - DNA, 22 bp, Artificial Sequence
  chemically synthesized
accagaagcagatgctggtgcc

SEQ ID NO: 49238 - DNA, 22 bp, Artificial Sequence
  chemically synthesized
gtgccatgcttcctggagagct

SEQ ID NO: 49239 - DNA, 22 bp, Artificial Sequence
  chemically synthesized
cctggagagcttgcagaatcat

SEQ ID NO: 49240 - DNA, 22 bp, Artificial Sequence
  chemically synthesized
ctggagagcttgcagaatcatg

SEQ ID NO: 49241 - DNA, 22 bp, Artificial Sequence
  chemically synthesized
gagagcttgcagaatcatgagc

SEQ ID NO: 49242 - DNA, 22 bp, Artificial Sequence
  chemically synthesized
gcagaatcatgagctgaataaa

SEQ ID NO: 49243 - DNA, 22 bp, Artificial Sequence
  chemically synthesized
cagaatcatgagctgaataaat

SEQ ID NO: 49244 - DNA, 22 bp, Artificial Sequence
  chemically synthesized
aataaatcccttttccttgtaa

SEQ ID NO: 49245 - DNA, 22 bp, Artificial Sequence
  chemically synthesized
ttccttgtaaattactcacctt

SEQ ID NO: 49246 - DNA, 22 bp, Artificial Sequence
  chemically synthesized
tccttgtaaattactcaccttc

SEQ ID NO: 49247 - DNA, 22 bp, Artificial Sequence
  chemically synthesized
ccttgtaaattactcaccttca

SEQ ID NO: 49248 - DNA, 22 bp, Artificial Sequence
  chemically synthesized
cttgtaaattactcaccttcag

SEQ ID NO: 49249 - DNA, 22 bp, Artificial Sequence
  chemically synthesized
gtaaattactcaccttcaggta

SEQ ID NO: 49250 - DNA, 22 bp, Artificial Sequence
  chemically synthesized
taaattactcaccttcaggtat

SEQ ID NO: 49251 - DNA, 22 bp, Artificial Sequence
  chemically synthesized
ctcaccttcaggtattccttta

SEQ ID NO: 49252 - DNA, 22 bp, Artificial Sequence
  chemically synthesized
accttcaggtattcctttatat

SEQ ID NO: 49253 - DNA, 22 bp, Artificial Sequence
  chemically synthesized
caggtattcctttatatagcaa

SEQ ID NO: 49254 - DNA, 22 bp, Artificial Sequence
  chemically synthesized
aggtattcctttatatagcaac

SEQ ID NO: 49255 - DNA, 22 bp, Artificial Sequence
  chemically synthesized
ctttatatagcaacacaaaagg

SEQ ID NO: 49256 - DNA, 22 bp, Artificial Sequence
  chemically synthesized
tatatagcaacacaaaaggact

SEQ ID NO: 49257 - DNA, 22 bp, Artificial Sequence
  chemically synthesized
atatagcaacacaaaaggacta

SEQ ID NO: 49258 - DNA, 22 bp, Artificial Sequence
  chemically synthesized
tatagcaacacaaaaggactaa

SEQ ID NO: 49259 - DNA, 22 bp, Artificial Sequence
  chemically synthesized
agacagtggccttgacttttct

SEQ ID NO: 49260 - DNA, 22 bp, Artificial Sequence
  chemically synthesized
gacttttctctctctttaagaa

SEQ ID NO: 49261 - DNA, 22 bp, Artificial Sequence
  chemically synthesized
acttttctctctctttaagaag

SEQ ID NO: 49262 - DNA, 22 bp, Artificial Sequence
  chemically synthesized
ttctctctctttaagaagtgtt

SEQ ID NO: 49263 - DNA, 22 bp, Artificial Sequence
  chemically synthesized
tctctctctttaagaagtgttg

SEQ ID NO: 49264 - DNA, 22 bp, Artificial Sequence
  chemically synthesized
ctctctctttaagaagtgttgc

SEQ ID NO: 49265 - DNA, 22 bp, Artificial Sequence
  chemically synthesized
tctctctttaagaagtgttgcc

SEQ ID NO: 49266 - DNA, 22 bp, Artificial Sequence
  chemically synthesized
tctctttaagaagtgttgcctt

SEQ ID NO: 49267 - DNA, 22 bp, Artificial Sequence
  chemically synthesized
tctttaagaagtgttgcctttg

SEQ ID NO: 49268 - DNA, 22 bp, Artificial Sequence
  chemically synthesized
tttaagaagtgttgcctttgct

SEQ ID NO: 49269 - DNA, 22 bp, Artificial Sequence
  chemically synthesized
taagaagtgttgcctttgctca

SEQ ID NO: 49270 - DNA, 22 bp, Artificial Sequence
  chemically synthesized
aagaagtgttgcctttgctcac

SEQ ID NO: 49271 - DNA, 22 bp, Artificial Sequence
  chemically synthesized
agaagtgttgcctttgctcact

SEQ ID NO: 49272 - DNA, 22 bp, Artificial Sequence
  chemically synthesized
cctttgctcacttagtcatccc

SEQ ID NO: 49273 - DNA, 22 bp, Artificial Sequence
  chemically synthesized
tgctcacttagtcatcccttct

SEQ ID NO: 49274 - DNA, 22 bp, Artificial Sequence
  chemically synthesized
gctcacttagtcatcccttctg

SEQ ID NO: 49275 - DNA, 22 bp, Artificial Sequence
  chemically synthesized
ctcacttagtcatcccttctgc

SEQ ID NO: 49276 - DNA, 22 bp, Artificial Sequence
  chemically synthesized
acttagtcatcccttctgcctg

SEQ ID NO: 49277 - DNA, 22 bp, Artificial Sequence
  chemically synthesized
agtcatcccttctgcctgcatt

SEQ ID NO: 49278 - DNA, 22 bp, Artificial Sequence
  chemically synthesized
gtcatcccttctgcctgcattt

SEQ ID NO: 49279 - DNA, 22 bp, Artificial Sequence
  chemically synthesized
ctgcctgcatttgtagagcatc

SEQ ID NO: 49280 - DNA, 22 bp, Artificial Sequence
  chemically synthesized
tgcctgcatttgtagagcatct

SEQ ID NO: 49281 - DNA, 22 bp, Artificial Sequence
  chemically synthesized
cctgcatttgtagagcatctgg

SEQ ID NO: 49282 - DNA, 22 bp, Artificial Sequence
  chemically synthesized
catttgtagagcatctggatgg

SEQ ID NO: 49283 - DNA, 22 bp, Artificial Sequence
  chemically synthesized
gtagagcatctggatgggagat

SEQ ID NO: 49284 - DNA, 22 bp, Artificial Sequence
  chemically synthesized
tagagcatctggatgggagatt

SEQ ID NO: 49285 - DNA, 22 bp, Artificial Sequence
  chemically synthesized
gatgggagatttatataaccgt

SEQ ID NO: 49286 - DNA, 22 bp, Artificial Sequence
  chemically synthesized
atataaccgtcactcttgactt

SEQ ID NO: 49287 - DNA, 22 bp, Artificial Sequence
  chemically synthesized
tataaccgtcactcttgacttt

SEQ ID NO: 49288 - DNA, 22 bp, Artificial Sequence
  chemically synthesized
ttgactttcccagcaggcctat

SEQ ID NO: 49289 - DNA, 22 bp, Artificial Sequence
  chemically synthesized
gactttcccagcaggcctatgt

SEQ ID NO: 49290 - DNA, 22 bp, Artificial Sequence
  chemically synthesized
actttcccagcaggcctatgtc

SEQ ID NO: 49291 - DNA, 22 bp, Artificial Sequence
  chemically synthesized
tcccagcaggcctatgtcatag

SEQ ID NO: 49292 - DNA, 22 bp, Artificial Sequence
  chemically synthesized
cccagcaggcctatgtcatagg

SEQ ID NO: 49293 - DNA, 22 bp, Artificial Sequence
  chemically synthesized
ccagcaggcctatgtcataggt

SEQ ID NO: 49294 - DNA, 22 bp, Artificial Sequence
  chemically synthesized
tgtcataggtactgtggtctct

SEQ ID NO: 49295 - DNA, 22 bp, Artificial Sequence
  chemically synthesized
tggtctctacaatacagcagag

SEQ ID NO: 49296 - DNA, 22 bp, Artificial Sequence
  chemically synthesized
tacaatacagcagaggtatctg

SEQ ID NO: 49297 - DNA, 22 bp, Artificial Sequence
  chemically synthesized
caatacagcagaggtatctgag

SEQ ID NO: 49298 - DNA, 22 bp, Artificial Sequence
  chemically synthesized
aggctccgagaggttgagtgac

SEQ ID NO: 49299 - DNA, 22 bp, Artificial Sequence
  chemically synthesized
cgagaggttgagtgacttgctc

SEQ ID NO: 49300 - DNA, 22 bp, Artificial Sequence
  chemically synthesized
agtgacttgctcatggctgcac

SEQ ID NO: 49301 - DNA, 22 bp, Artificial Sequence
  chemically synthesized
gctcatggctgcacaaccagta

SEQ ID NO: 49302 - DNA, 22 bp, Artificial Sequence
  chemically synthesized
ctcatggctgcacaaccagtaa

SEQ ID NO: 49303 - DNA, 22 bp, Artificial Sequence
  chemically synthesized
atggctgcacaaccagtaaata

SEQ ID NO: 49304 - DNA, 22 bp, Artificial Sequence
  chemically synthesized
cacaaccagtaaatattggagc

SEQ ID NO: 49305 - DNA, 22 bp, Artificial Sequence
  chemically synthesized
gagctggaattcaggtccacgg

SEQ ID NO: 49306 - DNA, 22 bp, Artificial Sequence
  chemically synthesized
gaattcaggtccacggtttcct

SEQ ID NO: 49307 - DNA, 22 bp, Artificial Sequence
  chemically synthesized
aggtccacggtttcctggctcc

SEQ ID NO: 49308 - DNA, 22 bp, Artificial Sequence
  chemically synthesized
cctggctccaaagcccatgatt

SEQ ID NO: 49309 - DNA, 22 bp, Artificial Sequence
  chemically synthesized
ctggctccaaagcccatgattt

SEQ ID NO: 49310 - DNA, 22 bp, Artificial Sequence
  chemically synthesized
gctccaaagcccatgatttttt

SEQ ID NO: 49311 - DNA, 22 bp, Artificial Sequence
  chemically synthesized
caaagcccatgattttttccct

SEQ ID NO: 49312 - DNA, 22 bp, Artificial Sequence
  chemically synthesized
tttccctcaatttattctgact

SEQ ID NO: 49313 - DNA, 22 bp, Artificial Sequence
  chemically synthesized
ttccctcaatttattctgactg

SEQ ID NO: 49314 - DNA, 22 bp, Artificial Sequence
  chemically synthesized
tccctcaatttattctgactgg

SEQ ID NO: 49315 - DNA, 22 bp, Artificial Sequence
  chemically synthesized
ccctcaatttattctgactggg

SEQ ID NO: 49316 - DNA, 22 bp, Artificial Sequence
  chemically synthesized
cctcaatttattctgactgggg

SEQ ID NO: 49317 - DNA, 22 bp, Artificial Sequence
  chemically synthesized
aatttattctgactggggcatg

SEQ ID NO: 49318 - DNA, 22 bp, Artificial Sequence
  chemically synthesized
attctgactggggcatggggga

SEQ ID NO: 49319 - DNA, 22 bp, Artificial Sequence
  chemically synthesized
ttctgactggggcatgggggag

SEQ ID NO: 49320 - DNA, 22 bp, Artificial Sequence
  chemically synthesized
tgactggggcatgggggagggg

SEQ ID NO: 49321 - DNA, 22 bp, Artificial Sequence
  chemically synthesized
actggggcatgggggagggggt

SEQ ID NO: 49322 - DNA, 22 bp, Artificial Sequence
  chemically synthesized
gggcatgggggagggggtggcc

SEQ ID NO: 49323 - DNA, 22 bp, Artificial Sequence
  chemically synthesized
tgggcagggccaccaggagcga

SEQ ID NO: 49324 - DNA, 22 bp, Artificial Sequence
  chemically synthesized
gggcagggccaccaggagcgac

SEQ ID NO: 49325 - DNA, 22 bp, Artificial Sequence
  chemically synthesized
ggcagggccaccaggagcgacc

SEQ ID NO: 49326 - DNA, 22 bp, Artificial Sequence
  chemically synthesized
ggtgcaggtacagaggaaaacc

SEQ ID NO: 49327 - DNA, 22 bp, Artificial Sequence
  chemically synthesized
ttgtcgagtgtggcccgtagtt

SEQ ID NO: 49328 - DNA, 22 bp, Artificial Sequence
  chemically synthesized
tcgagtgtggcccgtagttccc

SEQ ID NO: 49329 - DNA, 22 bp, Artificial Sequence
  chemically synthesized
ccatttttgcctgaatggcaca

SEQ ID NO: 49330 - DNA, 22 bp, Artificial Sequence
  chemically synthesized
ttgcctgaatggcacatttgaa

SEQ ID NO: 49331 - DNA, 22 bp, Artificial Sequence
  chemically synthesized
tgcctgaatggcacatttgaaa

SEQ ID NO: 49332 - DNA, 22 bp, Artificial Sequence
  chemically synthesized
gcctgaatggcacatttgaaag

SEQ ID NO: 49333 - DNA, 22 bp, Artificial Sequence
  chemically synthesized
cctgaatggcacatttgaaagt

SEQ ID NO: 49334 - DNA, 22 bp, Artificial Sequence
  chemically synthesized
aatggcacatttgaaagtgtta

SEQ ID NO: 49335 - DNA, 22 bp, Artificial Sequence
  chemically synthesized
gaaagtgttatataaccatgtg

SEQ ID NO: 49336 - DNA, 22 bp, Artificial Sequence
  chemically synthesized
aaagtgttatataaccatgtga

SEQ ID NO: 49337 - DNA, 22 bp, Artificial Sequence
  chemically synthesized
tataaccatgtgaataataata

SEQ ID NO: 49338 - DNA, 22 bp, Artificial Sequence
  chemically synthesized
gcctatatgagttctttaattt

SEQ ID NO: 49339 - DNA, 22 bp, Artificial Sequence
  chemically synthesized
tatgagttctttaatttgcttt

SEQ ID NO: 49340 - DNA, 22 bp, Artificial Sequence
  chemically synthesized
tttaatttgctttttggtccgc

SEQ ID NO: 49341 - DNA, 22 bp, Artificial Sequence
  chemically synthesized
taatttgctttttggtccgcat

SEQ ID NO: 49342 - DNA, 22 bp, Artificial Sequence
  chemically synthesized
aatttgctttttggtccgcatt

SEQ ID NO: 49343 - DNA, 22 bp, Artificial Sequence
  chemically synthesized
atttgctttttggtccgcattt

SEQ ID NO: 49344 - DNA, 22 bp, Artificial Sequence
  chemically synthesized
gctttttggtccgcatttggta

SEQ ID NO: 49345 - DNA, 22 bp, Artificial Sequence
  chemically synthesized
ctttttggtccgcatttggtaa

SEQ ID NO: 49346 - DNA, 22 bp, Artificial Sequence
  chemically synthesized
tttggtccgcatttggtaactt

SEQ ID NO: 49347 - DNA, 22 bp, Artificial Sequence
  chemically synthesized
ttggtccgcatttggtaacttc

SEQ ID NO: 49348 - DNA, 22 bp, Artificial Sequence
  chemically synthesized
tggtccgcatttggtaacttct

SEQ ID NO: 49349 - DNA, 22 bp, Artificial Sequence
  chemically synthesized
ggtccgcatttggtaacttctt

SEQ ID NO: 49350 - DNA, 22 bp, Artificial Sequence
  chemically synthesized
gtccgcatttggtaacttcttt

SEQ ID NO: 49351 - DNA, 22 bp, Artificial Sequence
  chemically synthesized
ggtaacttctttatcatctact

SEQ ID NO: 49352 - DNA, 22 bp, Artificial Sequence
  chemically synthesized
gtaacttctttatcatctacta

SEQ ID NO: 49353 - DNA, 22 bp, Artificial Sequence
  chemically synthesized
ctttatcatctactatactctg

SEQ ID NO: 49354 - DNA, 22 bp, Artificial Sequence
  chemically synthesized
tttatcatctactatactctgt

SEQ ID NO: 49355 - DNA, 22 bp, Artificial Sequence
  chemically synthesized
tatcatctactatactctgttg

SEQ ID NO: 49356 - DNA, 22 bp, Artificial Sequence
  chemically synthesized
atcatctactatactctgttgt

SEQ ID NO: 49357 - DNA, 22 bp, Artificial Sequence
  chemically synthesized
tcatctactatactctgttgtg

SEQ ID NO: 49358 - DNA, 22 bp, Artificial Sequence
  chemically synthesized
ctatactctgttgtgtctcttt

SEQ ID NO: 49359 - DNA, 22 bp, Artificial Sequence
  chemically synthesized
tactctgttgtgtctcttttgt

SEQ ID NO: 49360 - DNA, 22 bp, Artificial Sequence
  chemically synthesized
tgttgtgtctcttttgttgtaa

SEQ ID NO: 49361 - DNA, 22 bp, Artificial Sequence
  chemically synthesized
ttgtgtctcttttgttgtaatt

SEQ ID NO: 49362 - DNA, 22 bp, Artificial Sequence
  chemically synthesized
tgtctcttttgttgtaatttgt

SEQ ID NO: 49363 - DNA, 22 bp, Artificial Sequence
  chemically synthesized
ttttgttgtaatttgtaagtag

SEQ ID NO: 49364 - DNA, 22 bp, Artificial Sequence
  chemically synthesized
ttgttgtaatttgtaagtaggg

SEQ ID NO: 49365 - DNA, 22 bp, Artificial Sequence
  chemically synthesized
tgttgtaatttgtaagtagggg

SEQ ID NO: 49366 - DNA, 22 bp, Artificial Sequence
  chemically synthesized
gttgtaatttgtaagtaggggt

SEQ ID NO: 49367 - DNA, 22 bp, Artificial Sequence
  chemically synthesized
ttgtaatttgtaagtaggggtg

SEQ ID NO: 49368 - DNA, 22 bp, Artificial Sequence
  chemically synthesized
taatttgtaagtaggggtgaga

SEQ ID NO: 49369 - DNA, 22 bp, Artificial Sequence
  chemically synthesized
gtaagtaggggtgagataaagt

SEQ ID NO: 49370 - DNA, 22 bp, Artificial Sequence
  chemically synthesized
taagtaggggtgagataaagta

SEQ ID NO: 49371 - DNA, 22 bp, Artificial Sequence
  chemically synthesized
gggtttgctgggtttcttccat

SEQ ID NO: 49372 - DNA, 22 bp, Artificial Sequence
  chemically synthesized
gctgggtttcttccatgtcatc

SEQ ID NO: 49373 - DNA, 22 bp, Artificial Sequence
  chemically synthesized
ctgggtttcttccatgtcatca

SEQ ID NO: 49374 - DNA, 22 bp, Artificial Sequence
  chemically synthesized
ggtttcttccatgtcatcatgt

SEQ ID NO: 49375 - DNA, 22 bp, Artificial Sequence
  chemically synthesized
cttccatgtcatcatgttcctc

SEQ ID NO: 49376 - DNA, 22 bp, Artificial Sequence
  chemically synthesized
ttccatgtcatcatgttcctcc

SEQ ID NO: 49377 - DNA, 22 bp, Artificial Sequence
  chemically synthesized
ccatgtcatcatgttcctcctt

SEQ ID NO: 49378 - DNA, 22 bp, Artificial Sequence
  chemically synthesized
catgtcatcatgttcctccttg

SEQ ID NO: 49379 - DNA, 22 bp, Artificial Sequence
  chemically synthesized
ctccttgcatggggccaggatc

SEQ ID NO: 49380 - DNA, 22 bp, Artificial Sequence
  chemically synthesized
cttgcatggggccaggatccgt

SEQ ID NO: 49381 - DNA, 22 bp, Artificial Sequence
  chemically synthesized
gcatggggccaggatccgtgga

SEQ ID NO: 49382 - DNA, 22 bp, Artificial Sequence
  chemically synthesized
catggggccaggatccgtggag

SEQ ID NO: 49383 - DNA, 22 bp, Artificial Sequence
  chemically synthesized
cctggcacctacgtggtggtgc

SEQ ID NO: 49384 - DNA, 22 bp, Artificial Sequence
  chemically synthesized
gcacctacgtggtggtgctgaa

SEQ ID NO: 49385 - DNA, 22 bp, Artificial Sequence
  chemically synthesized
cgtggtggtgctgaaggaggag

SEQ ID NO: 49386 - DNA, 22 bp, Artificial Sequence
  chemically synthesized
aaggaggagacccacctctcgc

SEQ ID NO: 49387 - DNA, 22 bp, Artificial Sequence
  chemically synthesized
tcgcagtcagagcgcactgccc

SEQ ID NO: 49388 - DNA, 22 bp, Artificial Sequence
  chemically synthesized
gcagtcagagcgcactgcccgc

SEQ ID NO: 49389 - DNA, 22 bp, Artificial Sequence
  chemically synthesized
cccgccgcctgcaggcccaggc

SEQ ID NO: 49390 - DNA, 22 bp, Artificial Sequence
  chemically synthesized
caggcccaggctgcccgccggg

SEQ ID NO: 49391 - DNA, 22 bp, Artificial Sequence
  chemically synthesized
cccgccggggatacctcaccaa

SEQ ID NO: 49392 - DNA, 22 bp, Artificial Sequence
  chemically synthesized
accaagatcctgcatgtcttcc

SEQ ID NO: 49393 - DNA, 22 bp, Artificial Sequence
  chemically synthesized
catgtcttccatggccttcttc

SEQ ID NO: 49394 - DNA, 22 bp, Artificial Sequence
  chemically synthesized
ccatggccttcttcctggcttc

SEQ ID NO: 49395 - DNA, 22 bp, Artificial Sequence
  chemically synthesized
catggccttcttcctggcttcc

SEQ ID NO: 49396 - DNA, 22 bp, Artificial Sequence
  chemically synthesized
cttcctggcttcctggtgaaga

SEQ ID NO: 49397 - DNA, 22 bp, Artificial Sequence
  chemically synthesized
ttcctggcttcctggtgaagat

SEQ ID NO: 49398 - DNA, 22 bp, Artificial Sequence
  chemically synthesized
cctggcttcctggtgaagatga

SEQ ID NO: 49399 - DNA, 22 bp, Artificial Sequence
  chemically synthesized
ctggcttcctggtgaagatgag

SEQ ID NO: 49400 - DNA, 22 bp, Artificial Sequence
  chemically synthesized
gcttcctggtgaagatgagtgg

SEQ ID NO: 49401 - DNA, 22 bp, Artificial Sequence
  chemically synthesized
cctggtgaagatgagtggcgac

SEQ ID NO: 49402 - DNA, 22 bp, Artificial Sequence
  chemically synthesized
ctggtgaagatgagtggcgacc

SEQ ID NO: 49403 - DNA, 22 bp, Artificial Sequence
  chemically synthesized
gtgaagatgagtggcgacctgc

SEQ ID NO: 49404 - DNA, 22 bp, Artificial Sequence
  chemically synthesized
ctggagctggtgagccaccctt

SEQ ID NO: 49405 - DNA, 22 bp, Artificial Sequence
  chemically synthesized
gagctggtgagccacccttttt

SEQ ID NO: 49406 - DNA, 22 bp, Artificial Sequence
  chemically synthesized
gtgagccaccctttttgggaat

SEQ ID NO: 49407 - DNA, 22 bp, Artificial Sequence
  chemically synthesized
tttgggaatggcacttcctgat

SEQ ID NO: 49408 - DNA, 22 bp, Artificial Sequence
  chemically synthesized
ttgggaatggcacttcctgata

SEQ ID NO: 49409 - DNA, 22 bp, Artificial Sequence
  chemically synthesized
tgggaatggcacttcctgatag

SEQ ID NO: 49410 - DNA, 22 bp, Artificial Sequence
  chemically synthesized
gggaatggcacttcctgatagg

SEQ ID NO: 49411 - DNA, 22 bp, Artificial Sequence
  chemically synthesized
ggaatggcacttcctgataggg

SEQ ID NO: 49412 - DNA, 22 bp, Artificial Sequence
  chemically synthesized
cctgatagggctgggccactgc

SEQ ID NO: 49413 - DNA, 22 bp, Artificial Sequence
  chemically synthesized
ctgatagggctgggccactgca

SEQ ID NO: 49414 - DNA, 22 bp, Artificial Sequence
  chemically synthesized
atagggctgggccactgcatat

SEQ ID NO: 49415 - DNA, 22 bp, Artificial Sequence
  chemically synthesized
ggccactgcatatacactgggg

SEQ ID NO: 49416 - DNA, 22 bp, Artificial Sequence
  chemically synthesized
catatacactggggactgtgct

SEQ ID NO: 49417 - DNA, 22 bp, Artificial Sequence
  chemically synthesized
gggactgtgcttagtaggccca

SEQ ID NO: 49418 - DNA, 22 bp, Artificial Sequence
  chemically synthesized
tgcttagtaggcccattgctga

SEQ ID NO: 49419 - DNA, 22 bp, Artificial Sequence
  chemically synthesized
agtaggcccattgctgaaaatc

SEQ ID NO: 49420 - DNA, 22 bp, Artificial Sequence
  chemically synthesized
gtaggcccattgctgaaaatca

SEQ ID NO: 49421 - DNA, 22 bp, Artificial Sequence
  chemically synthesized
ctgaaaatcagaaggggacagc

SEQ ID NO: 49422 - DNA, 22 bp, Artificial Sequence
  chemically synthesized
aaaatcagaaggggacagcaag

SEQ ID NO: 49423 - DNA, 22 bp, Artificial Sequence
  chemically synthesized
agcacttatcgggtaccaagca

SEQ ID NO: 49424 - DNA, 22 bp, Artificial Sequence
  chemically synthesized
atcgggtaccaagcacagtaac

SEQ ID NO: 49425 - DNA, 22 bp, Artificial Sequence
  chemically synthesized
tcgggtaccaagcacagtaact

SEQ ID NO: 49426 - DNA, 22 bp, Artificial Sequence
  chemically synthesized
ctggctttctgtatagaattcc

SEQ ID NO: 49427 - DNA, 22 bp, Artificial Sequence
  chemically synthesized
gctttctgtatagaattccctt

SEQ ID NO: 49428 - DNA, 22 bp, Artificial Sequence
  chemically synthesized
tctgtatagaattccctttaag

SEQ ID NO: 49429 - DNA, 22 bp, Artificial Sequence
  chemically synthesized
ctgtatagaattccctttaagc

SEQ ID NO: 49430 - DNA, 22 bp, Artificial Sequence
  chemically synthesized
tgtatagaattccctttaagcc

SEQ ID NO: 49431 - DNA, 22 bp, Artificial Sequence
  chemically synthesized
tatagaattccctttaagcctg

SEQ ID NO: 49432 - DNA, 22 bp, Artificial Sequence
  chemically synthesized
cctttaagcctggccatgcccc

SEQ ID NO: 49433 - DNA, 22 bp, Artificial Sequence
  chemically synthesized
taagcctggccatgccccagtg

SEQ ID NO: 49434 - DNA, 22 bp, Artificial Sequence
  chemically synthesized
aagcctggccatgccccagtgg

SEQ ID NO: 49435 - DNA, 22 bp, Artificial Sequence
  chemically synthesized
agcctggccatgccccagtggt

SEQ ID NO: 49436 - DNA, 22 bp, Artificial Sequence
  chemically synthesized
gccatgccccagtggtacgtct

SEQ ID NO: 49437 - DNA, 22 bp, Artificial Sequence
  chemically synthesized
tcttcatttgaaagacgaggag

SEQ ID NO: 49438 - DNA, 22 bp, Artificial Sequence
  chemically synthesized
catttgaaagacgaggagactg

SEQ ID NO: 49439 - DNA, 22 bp, Artificial Sequence
  chemically synthesized
atttgaaagacgaggagactga

SEQ ID NO: 49440 - DNA, 22 bp, Artificial Sequence
  chemically synthesized
gaaagacgaggagactgaagtt

SEQ ID NO: 49441 - DNA, 22 bp, Artificial Sequence
  chemically synthesized
aaagacgaggagactgaagttc

SEQ ID NO: 49442 - DNA, 22 bp, Artificial Sequence
  chemically synthesized
aagttcagaggggaccacacag

SEQ ID NO: 49443 - DNA, 22 bp, Artificial Sequence
  chemically synthesized
agaggggaccacacagacagct

SEQ ID NO: 49444 - DNA, 22 bp, Artificial Sequence
  chemically synthesized
ggggtagagcctggatcaaacc

SEQ ID NO: 49445 - DNA, 22 bp, Artificial Sequence
  chemically synthesized
gatcaaacccattggtctgcct

SEQ ID NO: 49446 - DNA, 22 bp, Artificial Sequence
  chemically synthesized
gtctgcctgccagccattcttg

SEQ ID NO: 49447 - DNA, 22 bp, Artificial Sequence
  chemically synthesized
cctgccagccattcttgtgcca

SEQ ID NO: 49448 - DNA, 22 bp, Artificial Sequence
  chemically synthesized
ccagccattcttgtgccaatgc

SEQ ID NO: 49449 - DNA, 22 bp, Artificial Sequence
  chemically synthesized
ttgtgccaatgcatctgctgcc

SEQ ID NO: 49450 - DNA, 22 bp, Artificial Sequence
  chemically synthesized
gtgccaatgcatctgctgccta

SEQ ID NO: 49451 - DNA, 22 bp, Artificial Sequence
  chemically synthesized
tgccaatgcatctgctgcctac

SEQ ID NO: 49452 - DNA, 22 bp, Artificial Sequence
  chemically synthesized
ctgcctacggaaacctgtaggg

SEQ ID NO: 49453 - DNA, 22 bp, Artificial Sequence
  chemically synthesized
cctacggaaacctgtagggaca

SEQ ID NO: 49454 - DNA, 22 bp, Artificial Sequence
  chemically synthesized
cggaaacctgtagggacaaggc

SEQ ID NO: 49455 - DNA, 22 bp, Artificial Sequence
  chemically synthesized
tagggacaaggccctgggatgt

SEQ ID NO: 49456 - DNA, 22 bp, Artificial Sequence
  chemically synthesized
ggatgttcagtggagcctgagt

SEQ ID NO: 49457 - DNA, 22 bp, Artificial Sequence
  chemically synthesized
agtggagcctgagtcattttat

SEQ ID NO: 49458 - DNA, 22 bp, Artificial Sequence
  chemically synthesized
agtcattttataaaaaagcatg

SEQ ID NO: 49459 - DNA, 22 bp, Artificial Sequence
  chemically synthesized
tataaaaaagcatgactctagg

SEQ ID NO: 49460 - DNA, 22 bp, Artificial Sequence
  chemically synthesized
ataaaaaagcatgactctaggg

SEQ ID NO: 49461 - DNA, 22 bp, Artificial Sequence
  chemically synthesized
taaaaaagcatgactctagggt

SEQ ID NO: 49462 - DNA, 22 bp, Artificial Sequence
  chemically synthesized
tagggtccaaaattcctttgaa

SEQ ID NO: 49463 - DNA, 22 bp, Artificial Sequence
  chemically synthesized
gggtccaaaattcctttgaagc

SEQ ID NO: 49464 - DNA, 22 bp, Artificial Sequence
  chemically synthesized
ctttgaagctgttgctatccag

SEQ ID NO: 49465 - DNA, 22 bp, Artificial Sequence
  chemically synthesized
tgaagctgttgctatccagagt

SEQ ID NO: 49466 - DNA, 22 bp, Artificial Sequence
  chemically synthesized
gaagctgttgctatccagagtg

SEQ ID NO: 49467 - DNA, 22 bp, Artificial Sequence
  chemically synthesized
aagctgttgctatccagagtga

SEQ ID NO: 49468 - DNA, 22 bp, Artificial Sequence
  chemically synthesized
ttgctatccagagtgaagtccc

SEQ ID NO: 49469 - DNA, 22 bp, Artificial Sequence
  chemically synthesized
ctatccagagtgaagtcccttc

SEQ ID NO: 49470 - DNA, 22 bp, Artificial Sequence
  chemically synthesized
tccagagtgaagtcccttcttt

SEQ ID NO: 49471 - DNA, 22 bp, Artificial Sequence
  chemically synthesized
ctttaggacagggtggccctcc

SEQ ID NO: 49472 - DNA, 22 bp, Artificial Sequence
  chemically synthesized
tttaggacagggtggccctcct

SEQ ID NO: 49473 - DNA, 22 bp, Artificial Sequence
  chemically synthesized
taggacagggtggccctcctcc

SEQ ID NO: 49474 - DNA, 22 bp, Artificial Sequence
  chemically synthesized
aggacagggtggccctcctccc

SEQ ID NO: 49475 - DNA, 22 bp, Artificial Sequence
  chemically synthesized
ggacagggtggccctcctccct

SEQ ID NO: 49476 - DNA, 22 bp, Artificial Sequence
  chemically synthesized
ctccctcctggatgtcacatct

SEQ ID NO: 49477 - DNA, 22 bp, Artificial Sequence
  chemically synthesized
cctcctggatgtcacatcttcg

SEQ ID NO: 49478 - DNA, 22 bp, Artificial Sequence
  chemically synthesized
ctggatgtcacatcttcggtgg

SEQ ID NO: 49479 - DNA, 22 bp, Artificial Sequence
  chemically synthesized
gatgtcacatcttcggtggagg

SEQ ID NO: 49480 - DNA, 22 bp, Artificial Sequence
  chemically synthesized
cggtggaggggcagaaagggga

SEQ ID NO: 49481 - DNA, 22 bp, Artificial Sequence
  chemically synthesized
ggtggaggggcagaaaggggac

SEQ ID NO: 49482 - DNA, 22 bp, Artificial Sequence
  chemically synthesized
ggtattctcctcaccctggccc

SEQ ID NO: 49483 - DNA, 22 bp, Artificial Sequence
  chemically synthesized
tcctcaccctggccctagtgct

SEQ ID NO: 49484 - DNA, 22 bp, Artificial Sequence
  chemically synthesized
ctcaccctggccctagtgcttc

SEQ ID NO: 49485 - DNA, 22 bp, Artificial Sequence
  chemically synthesized
accctggccctagtgcttcaaa

SEQ ID NO: 49486 - DNA, 22 bp, Artificial Sequence
  chemically synthesized
gccctagtgcttcaaatcttaa

SEQ ID NO: 49487 - DNA, 22 bp, Artificial Sequence
  chemically synthesized
gtgcttcaaatcttaaaaaaac

SEQ ID NO: 49488 - DNA, 22 bp, Artificial Sequence
  chemically synthesized
caaatcttaaaaaaacgttttt

SEQ ID NO: 49489 - DNA, 22 bp, Artificial Sequence
  chemically synthesized
aaatcttaaaaaaacgttttta

SEQ ID NO: 49490 - DNA, 22 bp, Artificial Sequence
  chemically synthesized
aaaaaaacgtttttatttgtgc

SEQ ID NO: 49491 - DNA, 22 bp, Artificial Sequence
  chemically synthesized
aaaaaacgtttttatttgtgct

SEQ ID NO: 49492 - DNA, 22 bp, Artificial Sequence
  chemically synthesized
ttatttgtgcttctgcaccacc

SEQ ID NO: 49493 - DNA, 22 bp, Artificial Sequence
  chemically synthesized
tatttgtgcttctgcaccacct

SEQ ID NO: 49494 - DNA, 22 bp, Artificial Sequence
  chemically synthesized
atttgtgcttctgcaccacctt

SEQ ID NO: 49495 - DNA, 22 bp, Artificial Sequence
  chemically synthesized
tttgtgcttctgcaccaccttc

SEQ ID NO: 49496 - DNA, 22 bp, Artificial Sequence
  chemically synthesized
gtgcttctgcaccaccttctag

SEQ ID NO: 49497 - DNA, 22 bp, Artificial Sequence
  chemically synthesized
tgcttctgcaccaccttctagc

SEQ ID NO: 49498 - DNA, 22 bp, Artificial Sequence
  chemically synthesized
gaaggtggtgcagaagcacaaa

SEQ ID NO: 49499 - DNA, 22 bp, Artificial Sequence
  chemically synthesized
ttttaagatttgaagcactagg

SEQ ID NO: 49500 - DNA, 22 bp, Artificial Sequence
  chemically synthesized
tttaagatttgaagcactaggg

SEQ ID NO: 49501 - DNA, 22 bp, Artificial Sequence
  chemically synthesized
ttaagatttgaagcactagggc

SEQ ID NO: 49502 - DNA, 22 bp, Artificial Sequence
  chemically synthesized
taagatttgaagcactagggcc

SEQ ID NO: 49503 - DNA, 22 bp, Artificial Sequence
  chemically synthesized
aagatttgaagcactagggcca

SEQ ID NO: 49504 - DNA, 22 bp, Artificial Sequence
  chemically synthesized
agatttgaagcactagggccag

SEQ ID NO: 49505 - DNA, 22 bp, Artificial Sequence
  chemically synthesized
gaagcactagggccagggtgag

SEQ ID NO: 49506 - DNA, 22 bp, Artificial Sequence
  chemically synthesized
aagcactagggccagggtgagg

SEQ ID NO: 49507 - DNA, 22 bp, Artificial Sequence
  chemically synthesized
gggccagggtgaggagaatacc

SEQ ID NO: 49508 - DNA, 22 bp, Artificial Sequence
  chemically synthesized
tctgcccctccaccgaagatgt

SEQ ID NO: 49509 - DNA, 22 bp, Artificial Sequence
  chemically synthesized
ctgcccctccaccgaagatgtg

SEQ ID NO: 49510 - DNA, 22 bp, Artificial Sequence
  chemically synthesized
tgcccctccaccgaagatgtga

SEQ ID NO: 49511 - DNA, 22 bp, Artificial Sequence
  chemically synthesized
cccctccaccgaagatgtgaca

SEQ ID NO: 49512 - DNA, 22 bp, Artificial Sequence
  chemically synthesized
caccgaagatgtgacatccagg

SEQ ID NO: 49513 - DNA, 22 bp, Artificial Sequence
  chemically synthesized
tcctaaagaagggacttcactc

SEQ ID NO: 49514 - DNA, 22 bp, Artificial Sequence
  chemically synthesized
aagaagggacttcactctggat

SEQ ID NO: 49515 - DNA, 22 bp, Artificial Sequence
  chemically synthesized
cactctggatagcaacagcttc

SEQ ID NO: 49516 - DNA, 22 bp, Artificial Sequence
  chemically synthesized
actctggatagcaacagcttca

SEQ ID NO: 49517 - DNA, 22 bp, Artificial Sequence
  chemically synthesized
tggatagcaacagcttcaaagg

SEQ ID NO: 49518 - DNA, 22 bp, Artificial Sequence
  chemically synthesized
gatagcaacagcttcaaaggaa

SEQ ID NO: 49519 - DNA, 22 bp, Artificial Sequence
  chemically synthesized
caaaggaattttggaccctaga

SEQ ID NO: 49520 - DNA, 22 bp, Artificial Sequence
  chemically synthesized
aaaggaattttggaccctagag

SEQ ID NO: 49521 - DNA, 22 bp, Artificial Sequence
  chemically synthesized
tggaccctagagtcatgctttt

SEQ ID NO: 49522 - DNA, 22 bp, Artificial Sequence
  chemically synthesized
ggaccctagagtcatgcttttt

SEQ ID NO: 49523 - DNA, 22 bp, Artificial Sequence
  chemically synthesized
gaccctagagtcatgctttttt

SEQ ID NO: 49524 - DNA, 22 bp, Artificial Sequence
  chemically synthesized
gagtcatgcttttttataaaat

SEQ ID NO: 49525 - DNA, 22 bp, Artificial Sequence
  chemically synthesized
ttttataaaatgactcaggctc

SEQ ID NO: 49526 - DNA, 22 bp, Artificial Sequence
  chemically synthesized
tttataaaatgactcaggctcc

SEQ ID NO: 49527 - DNA, 22 bp, Artificial Sequence
  chemically synthesized
ttataaaatgactcaggctcca

SEQ ID NO: 49528 - DNA, 22 bp, Artificial Sequence
  chemically synthesized
tataaaatgactcaggctccac

SEQ ID NO: 49529 - DNA, 22 bp, Artificial Sequence
  chemically synthesized
ataaaatgactcaggctccact

SEQ ID NO: 49530 - DNA, 22 bp, Artificial Sequence
  chemically synthesized
taaaatgactcaggctccactg

SEQ ID NO: 49531 - DNA, 22 bp, Artificial Sequence
  chemically synthesized
aggctccactgaacatcccagg

SEQ ID NO: 49532 - DNA, 22 bp, Artificial Sequence
  chemically synthesized
cactgaacatcccagggccttg

SEQ ID NO: 49533 - DNA, 22 bp, Artificial Sequence
  chemically synthesized
aacatcccagggccttgtccct

SEQ ID NO: 49534 - DNA, 22 bp, Artificial Sequence
  chemically synthesized
gtccctacaggtttccgtaggc

SEQ ID NO: 49535 - DNA, 22 bp, Artificial Sequence
  chemically synthesized
tccctacaggtttccgtaggca

SEQ ID NO: 49536 - DNA, 22 bp, Artificial Sequence
  chemically synthesized
caggtttccgtaggcagcagat

SEQ ID NO: 49537 - DNA, 22 bp, Artificial Sequence
  chemically synthesized
ccgtaggcagcagatgcattgg

SEQ ID NO: 49538 - DNA, 22 bp, Artificial Sequence
  chemically synthesized
cgtaggcagcagatgcattggc

SEQ ID NO: 49539 - DNA, 22 bp, Artificial Sequence
  chemically synthesized
gcacaagaatggctggcaggca

SEQ ID NO: 49540 - DNA, 22 bp, Artificial Sequence
  chemically synthesized
gcaggcagaccaatgggtttga

SEQ ID NO: 49541 - DNA, 22 bp, Artificial Sequence
  chemically synthesized
gatccaggctctacccctagct

SEQ ID NO: 49542 - DNA, 22 bp, Artificial Sequence
  chemically synthesized
atccaggctctacccctagctg

SEQ ID NO: 49543 - DNA, 22 bp, Artificial Sequence
  chemically synthesized
tacccctagctgtctgtgtggt

SEQ ID NO: 49544 - DNA, 22 bp, Artificial Sequence
  chemically synthesized
cccctagctgtctgtgtggtcc

SEQ ID NO: 49545 - DNA, 22 bp, Artificial Sequence
  chemically synthesized
gctgtctgtgtggtcccctctg

SEQ ID NO: 49546 - DNA, 22 bp, Artificial Sequence
  chemically synthesized
tctgtgtggtcccctctgaact

SEQ ID NO: 49547 - DNA, 22 bp, Artificial Sequence
  chemically synthesized
tgtggtcccctctgaacttcag

SEQ ID NO: 49548 - DNA, 22 bp, Artificial Sequence
  chemically synthesized
tgaacttcagtctcctcgtctt

SEQ ID NO: 49549 - DNA, 22 bp, Artificial Sequence
  chemically synthesized
aacttcagtctcctcgtctttc

SEQ ID NO: 49550 - DNA, 22 bp, Artificial Sequence
  chemically synthesized
cagtctcctcgtctttcaaatg

SEQ ID NO: 49551 - DNA, 22 bp, Artificial Sequence
  chemically synthesized
agtctcctcgtctttcaaatga

SEQ ID NO: 49552 - DNA, 22 bp, Artificial Sequence
  chemically synthesized
ctcgtctttcaaatgaagatag

SEQ ID NO: 49553 - DNA, 22 bp, Artificial Sequence
  chemically synthesized
gtctttcaaatgaagatagacg

SEQ ID NO: 49554 - DNA, 22 bp, Artificial Sequence
  chemically synthesized
tcaaatgaagatagacgtacca

SEQ ID NO: 49555 - DNA, 22 bp, Artificial Sequence
  chemically synthesized
caaatgaagatagacgtaccac

SEQ ID NO: 49556 - DNA, 22 bp, Artificial Sequence
  chemically synthesized
aaatgaagatagacgtaccact

SEQ ID NO: 49557 - DNA, 22 bp, Artificial Sequence
  chemically synthesized
gggcatggccaggcttaaaggg

SEQ ID NO: 49558 - DNA, 22 bp, Artificial Sequence
  chemically synthesized
aaagggaattctatacagaaag

SEQ ID NO: 49559 - DNA, 22 bp, Artificial Sequence
  chemically synthesized
aagggaattctatacagaaagc

SEQ ID NO: 49560 - DNA, 22 bp, Artificial Sequence
  chemically synthesized
tatacagaaagccagtagttac

SEQ ID NO: 49561 - DNA, 22 bp, Artificial Sequence
  chemically synthesized
tacagaaagccagtagttactg

SEQ ID NO: 49562 - DNA, 22 bp, Artificial Sequence
  chemically synthesized
ctgtgcttggtacccgataagt

SEQ ID NO: 49563 - DNA, 22 bp, Artificial Sequence
  chemically synthesized
tgcttggtacccgataagtgct

SEQ ID NO: 49564 - DNA, 22 bp, Artificial Sequence
  chemically synthesized
ggtacccgataagtgctcaata

SEQ ID NO: 49565 - DNA, 22 bp, Artificial Sequence
  chemically synthesized
gtacccgataagtgctcaatac

SEQ ID NO: 49566 - DNA, 22 bp, Artificial Sequence
  chemically synthesized
aatacatacttgctgtcccctt

SEQ ID NO: 49567 - DNA, 22 bp, Artificial Sequence
  chemically synthesized
gctgtccccttctgattttcag

SEQ ID NO: 49568 - DNA, 22 bp, Artificial Sequence
  chemically synthesized
ctgtccccttctgattttcagc

SEQ ID NO: 49569 - DNA, 22 bp, Artificial Sequence
  chemically synthesized
tccccttctgattttcagcaat

SEQ ID NO: 49570 - DNA, 22 bp, Artificial Sequence
  chemically synthesized
ctgattttcagcaatgggccta

SEQ ID NO: 49571 - DNA, 22 bp, Artificial Sequence
  chemically synthesized
tgattttcagcaatgggcctac

SEQ ID NO: 49572 - DNA, 22 bp, Artificial Sequence
  chemically synthesized
attttcagcaatgggcctacta

SEQ ID NO: 49573 - DNA, 22 bp, Artificial Sequence
  chemically synthesized
tcagcaatgggcctactaagca

SEQ ID NO: 49574 - DNA, 22 bp, Artificial Sequence
  chemically synthesized
cagcaatgggcctactaagcac

SEQ ID NO: 49575 - DNA, 22 bp, Artificial Sequence
  chemically synthesized
agcaatgggcctactaagcaca

SEQ ID NO: 49576 - DNA, 22 bp, Artificial Sequence
  chemically synthesized
ctaagcacagtccccagtgtat

SEQ ID NO: 49577 - DNA, 22 bp, Artificial Sequence
  chemically synthesized
agcacagtccccagtgtatatg

SEQ ID NO: 49578 - DNA, 22 bp, Artificial Sequence
  chemically synthesized
tcaggaagtgccattcccaaaa

SEQ ID NO: 49579 - DNA, 22 bp, Artificial Sequence
  chemically synthesized
ccaaaaagggtggctcaccagc

SEQ ID NO: 49580 - DNA, 22 bp, Artificial Sequence
  chemically synthesized
accagctccagcaggtcgccac

SEQ ID NO: 49581 - DNA, 22 bp, Artificial Sequence
  chemically synthesized
cagcaggtcgccactcatcttc

SEQ ID NO: 49582 - DNA, 22 bp, Artificial Sequence
  chemically synthesized
atcttcaccaggaagccaggaa

SEQ ID NO: 49583 - DNA, 22 bp, Artificial Sequence
  chemically synthesized
caccaggaagccaggaagaagg

SEQ ID NO: 49584 - DNA, 22 bp, Artificial Sequence
  chemically synthesized
accaggaagccaggaagaaggc

SEQ ID NO: 49585 - DNA, 22 bp, Artificial Sequence
  chemically synthesized
ggtgaggtatccccggcgggca

SEQ ID NO: 49586 - DNA, 22 bp, Artificial Sequence
  chemically synthesized
gtgaggtatccccggcgggcag

SEQ ID NO: 49587 - DNA, 22 bp, Artificial Sequence
  chemically synthesized
ggcctgcaggcggcgggcagtg

SEQ ID NO: 49588 - DNA, 22 bp, Artificial Sequence
  chemically synthesized
caggcggcgggcagtgcgctct

SEQ ID NO: 49589 - DNA, 22 bp, Artificial Sequence
  chemically synthesized
tgactgcgagaggtgggtctcc

SEQ ID NO: 49590 - DNA, 22 bp, Artificial Sequence
  chemically synthesized
actgcgagaggtgggtctcctc

SEQ ID NO: 49591 - DNA, 22 bp, Artificial Sequence
  chemically synthesized
cgagaggtgggtctcctccttc

SEQ ID NO: 49592 - DNA, 22 bp, Artificial Sequence
  chemically synthesized
ctccttcagcaccaccacgtag

SEQ ID NO: 49593 - DNA, 22 bp, Artificial Sequence
  chemically synthesized
cttcagcaccaccacgtaggtg

SEQ ID NO: 49594 - DNA, 22 bp, Artificial Sequence
  chemically synthesized
cagcaccaccacgtaggtgcca

SEQ ID NO: 49595 - DNA, 22 bp, Artificial Sequence
  chemically synthesized
agcaccaccacgtaggtgccag

SEQ ID NO: 49596 - DNA, 22 bp, Artificial Sequence
  chemically synthesized
cacggatcctggccccatgcaa

SEQ ID NO: 49597 - DNA, 22 bp, Artificial Sequence
  chemically synthesized
gccccatgcaaggaggaacatg

SEQ ID NO: 49598 - DNA, 22 bp, Artificial Sequence
  chemically synthesized
ggtgtactttatctcaccccta

SEQ ID NO: 49599 - DNA, 22 bp, Artificial Sequence
  chemically synthesized
tatctcacccctacttacaaat

SEQ ID NO: 49600 - DNA, 22 bp, Artificial Sequence
  chemically synthesized
atctcacccctacttacaaatt

SEQ ID NO: 49601 - DNA, 22 bp, Artificial Sequence
  chemically synthesized
tctcacccctacttacaaatta

SEQ ID NO: 49602 - DNA, 22 bp, Artificial Sequence
  chemically synthesized
acccctacttacaaattacaac

SEQ ID NO: 49603 - DNA, 22 bp, Artificial Sequence
  chemically synthesized
cttacaaattacaacaaaagag

SEQ ID NO: 49604 - DNA, 22 bp, Artificial Sequence
  chemically synthesized
acaaattacaacaaaagagaca

SEQ ID NO: 49605 - DNA, 22 bp, Artificial Sequence
  chemically synthesized
caaattacaacaaaagagacac

SEQ ID NO: 49606 - DNA, 22 bp, Artificial Sequence
  chemically synthesized
caacaaaagagacacaacagag

SEQ ID NO: 49607 - DNA, 22 bp, Artificial Sequence
  chemically synthesized
ccaaatgcggaccaaaaagcaa

SEQ ID NO: 49608 - DNA, 22 bp, Artificial Sequence
  chemically synthesized
aagaactcatataggccaacta

SEQ ID NO: 49609 - DNA, 22 bp, Artificial Sequence
  chemically synthesized
atataggccaactattattatt

SEQ ID NO: 49610 - DNA, 22 bp, Artificial Sequence
  chemically synthesized
ttattattcacatggttatata

SEQ ID NO: 49611 - DNA, 22 bp, Artificial Sequence
  chemically synthesized
ttattcacatggttatataaca

SEQ ID NO: 49612 - DNA, 22 bp, Artificial Sequence
  chemically synthesized
ttcacatggttatataacactt

SEQ ID NO: 49613 - DNA, 22 bp, Artificial Sequence
  chemically synthesized
acatggttatataacactttca

SEQ ID NO: 49614 - DNA, 22 bp, Artificial Sequence
  chemically synthesized
tataacactttcaaatgtgcca

SEQ ID NO: 49615 - DNA, 22 bp, Artificial Sequence
  chemically synthesized
tcaaatgtgccattcaggcaaa

SEQ ID NO: 49616 - DNA, 22 bp, Artificial Sequence
  chemically synthesized
caaatgtgccattcaggcaaaa

SEQ ID NO: 49617 - DNA, 22 bp, Artificial Sequence
  chemically synthesized
aaatgtgccattcaggcaaaaa

SEQ ID NO: 49618 - DNA, 22 bp, Artificial Sequence
  chemically synthesized
aggcaaaaatgggaactacggg

SEQ ID NO: 49619 - DNA, 22 bp, Artificial Sequence
  chemically synthesized
cgggccacactcgacaacaggt

SEQ ID NO: 49620 - DNA, 22 bp, Artificial Sequence
  chemically synthesized
gacaacaggttttcctctgtac

SEQ ID NO: 49621 - DNA, 22 bp, Artificial Sequence
  chemically synthesized
tcctctgtacctgcacccagct

SEQ ID NO: 49622 - DNA, 22 bp, Artificial Sequence
  chemically synthesized
cctctgtacctgcacccagctc

SEQ ID NO: 49623 - DNA, 22 bp, Artificial Sequence
  chemically synthesized
ctctgtacctgcacccagctct

SEQ ID NO: 49624 - DNA, 22 bp, Artificial Sequence
  chemically synthesized
tgtacctgcacccagctctcta

SEQ ID NO: 49625 - DNA, 22 bp, Artificial Sequence
  chemically synthesized
tacctgcacccagctctctacg

SEQ ID NO: 49626 - DNA, 22 bp, Artificial Sequence
  chemically synthesized
cacccagctctctacgggcctg

SEQ ID NO: 49627 - DNA, 22 bp, Artificial Sequence
  chemically synthesized
tctacgggcctggtcgctcctg

SEQ ID NO: 49628 - DNA, 22 bp, Artificial Sequence
  chemically synthesized
tacgggcctggtcgctcctggt

SEQ ID NO: 49629 - DNA, 22 bp, Artificial Sequence
  chemically synthesized
cgggcctggtcgctcctggtgg

SEQ ID NO: 49630 - DNA, 22 bp, Artificial Sequence
  chemically synthesized
gtcgctcctggtggccctgccc

SEQ ID NO: 49631 - DNA, 22 bp, Artificial Sequence
  chemically synthesized
ctggtggccctgcccaaaggcc

SEQ ID NO: 49632 - DNA, 22 bp, Artificial Sequence
  chemically synthesized
gtggccctgcccaaaggccacc

SEQ ID NO: 49633 - DNA, 22 bp, Artificial Sequence
  chemically synthesized
cccaaaggccaccccctccccc

SEQ ID NO: 49634 - DNA, 22 bp, Artificial Sequence
  chemically synthesized
ccccatgccccagtcagaataa

SEQ ID NO: 49635 - DNA, 22 bp, Artificial Sequence
  chemically synthesized
agggaaaaaatcatgggctttg

SEQ ID NO: 49636 - DNA, 22 bp, Artificial Sequence
  chemically synthesized
tggagccaggaaaccgtggacc

SEQ ID NO: 49637 - DNA, 22 bp, Artificial Sequence
  chemically synthesized
ggagccaggaaaccgtggacct

SEQ ID NO: 49638 - DNA, 22 bp, Artificial Sequence
  chemically synthesized
gagccaggaaaccgtggacctg

SEQ ID NO: 49639 - DNA, 22 bp, Artificial Sequence
  chemically synthesized
aattccagctccaatatttact

SEQ ID NO: 49640 - DNA, 22 bp, Artificial Sequence
  chemically synthesized
cagctccaatatttactggttg

SEQ ID NO: 49641 - DNA, 22 bp, Artificial Sequence
  chemically synthesized
caatatttactggttgtgcagc

SEQ ID NO: 49642 - DNA, 22 bp, Artificial Sequence
  chemically synthesized
actggttgtgcagccatgagca

SEQ ID NO: 49643 - DNA, 22 bp, Artificial Sequence
  chemically synthesized
ctggttgtgcagccatgagcaa

SEQ ID NO: 49644 - DNA, 22 bp, Artificial Sequence
  chemically synthesized
gttgtgcagccatgagcaagtc

SEQ ID NO: 49645 - DNA, 22 bp, Artificial Sequence
  chemically synthesized
tgcagccatgagcaagtcactc

SEQ ID NO: 49646 - DNA, 22 bp, Artificial Sequence
  chemically synthesized
aacctctcggagcctcagatac

SEQ ID NO: 49647 - DNA, 22 bp, Artificial Sequence
  chemically synthesized
tcggagcctcagatacctctgc

SEQ ID NO: 49648 - DNA, 22 bp, Artificial Sequence
  chemically synthesized
ggagcctcagatacctctgctg

SEQ ID NO: 49649 - DNA, 22 bp, Artificial Sequence
  chemically synthesized
agatacctctgctgtattgtag

SEQ ID NO: 49650 - DNA, 22 bp, Artificial Sequence
  chemically synthesized
tgctgtattgtagagaccacag

SEQ ID NO: 49651 - DNA, 22 bp, Artificial Sequence
  chemically synthesized
ctgtattgtagagaccacagta

SEQ ID NO: 49652 - DNA, 22 bp, Artificial Sequence
  chemically synthesized
tattgtagagaccacagtacct

SEQ ID NO: 49653 - DNA, 22 bp, Artificial Sequence
  chemically synthesized
tagagaccacagtacctatgac

SEQ ID NO: 49654 - DNA, 22 bp, Artificial Sequence
  chemically synthesized
tgacataggcctgctgggaaag

SEQ ID NO: 49655 - DNA, 22 bp, Artificial Sequence
  chemically synthesized
ctgggaaagtcaagagtgacgg

SEQ ID NO: 49656 - DNA, 22 bp, Artificial Sequence
  chemically synthesized
ggaaagtcaagagtgacggtta

SEQ ID NO: 49657 - DNA, 22 bp, Artificial Sequence
  chemically synthesized
tataaatctcccatccagatgc

SEQ ID NO: 49658 - DNA, 22 bp, Artificial Sequence
  chemically synthesized
ccatccagatgctctacaaatg

SEQ ID NO: 49659 - DNA, 22 bp, Artificial Sequence
  chemically synthesized
tacaaatgcaggcagaagggat

SEQ ID NO: 49660 - DNA, 22 bp, Artificial Sequence
  chemically synthesized
caaatgcaggcagaagggatga

SEQ ID NO: 49661 - DNA, 22 bp, Artificial Sequence
  chemically synthesized
agtgagcaaaggcaacacttct

SEQ ID NO: 49662 - DNA, 22 bp, Artificial Sequence
  chemically synthesized
cttaaagagagagaaaagtcaa

SEQ ID NO: 49663 - DNA, 22 bp, Artificial Sequence
  chemically synthesized
ttaaagagagagaaaagtcaag

SEQ ID NO: 49664 - DNA, 22 bp, Artificial Sequence
  chemically synthesized
aaagagagagaaaagtcaaggc

SEQ ID NO: 49665 - DNA, 22 bp, Artificial Sequence
  chemically synthesized
aagagagagaaaagtcaaggcc

SEQ ID NO: 49666 - DNA, 22 bp, Artificial Sequence
  chemically synthesized
tcttagtccttttgtgttgcta

SEQ ID NO: 49667 - DNA, 22 bp, Artificial Sequence
  chemically synthesized
agtccttttgtgttgctatata

SEQ ID NO: 49668 - DNA, 22 bp, Artificial Sequence
  chemically synthesized
gtccttttgtgttgctatataa

SEQ ID NO: 49669 - DNA, 22 bp, Artificial Sequence
  chemically synthesized
ttgtgttgctatataaaggaat

SEQ ID NO: 49670 - DNA, 22 bp, Artificial Sequence
  chemically synthesized
tgtgttgctatataaaggaata

SEQ ID NO: 49671 - DNA, 22 bp, Artificial Sequence
  chemically synthesized
gtgttgctatataaaggaatac

SEQ ID NO: 49672 - DNA, 22 bp, Artificial Sequence
  chemically synthesized
tgttgctatataaaggaatacc

SEQ ID NO: 49673 - DNA, 22 bp, Artificial Sequence
  chemically synthesized
ctatataaaggaatacctgaag

SEQ ID NO: 49674 - DNA, 22 bp, Artificial Sequence
  chemically synthesized
tataaaggaatacctgaaggtg

SEQ ID NO: 49675 - DNA, 22 bp, Artificial Sequence
  chemically synthesized
aaggtgagtaatttacaaggaa

SEQ ID NO: 49676 - DNA, 22 bp, Artificial Sequence
  chemically synthesized
acaaggaaaagggatttattca

SEQ ID NO: 49677 - DNA, 22 bp, Artificial Sequence
  chemically synthesized
caaggaaaagggatttattcag

SEQ ID NO: 49678 - DNA, 22 bp, Artificial Sequence
  chemically synthesized
attcagctcatgattctgcaag

SEQ ID NO: 49679 - DNA, 22 bp, Artificial Sequence
  chemically synthesized
ttcagctcatgattctgcaagc

SEQ ID NO: 49680 - DNA, 22 bp, Artificial Sequence
  chemically synthesized
agctcatgattctgcaagctct

SEQ ID NO: 49681 - DNA, 22 bp, Artificial Sequence
  chemically synthesized
atgattctgcaagctctccagg

SEQ ID NO: 49682 - DNA, 22 bp, Artificial Sequence
  chemically synthesized
tgcaagctctccaggaagcatg

SEQ ID NO: 49683 - DNA, 22 bp, Artificial Sequence
  chemically synthesized
caagctctccaggaagcatggc

SEQ ID NO: 49684 - DNA, 22 bp, Artificial Sequence
  chemically synthesized
tccaggaagcatggcaccagca

SEQ ID NO: 49685 - DNA, 22 bp, Artificial Sequence
  chemically synthesized
caggaagcatggcaccagcatc

SEQ ID NO: 49686 - DNA, 22 bp, Artificial Sequence
  chemically synthesized
cttctggtgagggccttaagct

SEQ ID NO: 49687 - DNA, 22 bp, Artificial Sequence
  chemically synthesized
ctggtgagggccttaagctgct

SEQ ID NO: 49688 - DNA, 22 bp, Artificial Sequence
  chemically synthesized
tggtgagggccttaagctgctt

SEQ ID NO: 49689 - DNA, 22 bp, Artificial Sequence
  chemically synthesized
gtgagggccttaagctgctttc

SEQ ID NO: 49690 - DNA, 22 bp, Artificial Sequence
  chemically synthesized
aagctgctttcactgatggcag

SEQ ID NO: 49691 - DNA, 22 bp, Artificial Sequence
  chemically synthesized
agctgctttcactgatggcaga

SEQ ID NO: 49692 - DNA, 22 bp, Artificial Sequence
  chemically synthesized
ctttcactgatggcagaaggtg

SEQ ID NO: 49693 - DNA, 22 bp, Artificial Sequence
  chemically synthesized
tcactgatggcagaaggtgaag

SEQ ID NO: 49694 - DNA, 22 bp, Artificial Sequence
  chemically synthesized
cactgatggcagaaggtgaagg

SEQ ID NO: 49695 - DNA, 22 bp, Artificial Sequence
  chemically synthesized
actgatggcagaaggtgaaggg

SEQ ID NO: 49696 - DNA, 22 bp, Artificial Sequence
  chemically synthesized
atggcagaaggtgaaggggagc

SEQ ID NO: 49697 - DNA, 22 bp, Artificial Sequence
  chemically synthesized
catgtgcagagatcaatcacat

SEQ ID NO: 49698 - DNA, 22 bp, Artificial Sequence
  chemically synthesized
tttttaataatcagccttcaag

SEQ ID NO: 49699 - DNA, 22 bp, Artificial Sequence
  chemically synthesized
tttaataatcagccttcaaggg

SEQ ID NO: 49700 - DNA, 22 bp, Artificial Sequence
  chemically synthesized
ttaataatcagccttcaaggga

SEQ ID NO: 49701 - DNA, 22 bp, Artificial Sequence
  chemically synthesized
taataatcagccttcaagggaa

SEQ ID NO: 49702 - DNA, 22 bp, Artificial Sequence
  chemically synthesized
aataatcagccttcaagggaaa

SEQ ID NO: 49703 - DNA, 22 bp, Artificial Sequence
  chemically synthesized
ataatcagccttcaagggaaat

SEQ ID NO: 49704 - DNA, 22 bp, Artificial Sequence
  chemically synthesized
caagggaaatcatagcgggaga

SEQ ID NO: 49705 - DNA, 22 bp, Artificial Sequence
  chemically synthesized
aagggaaatcatagcgggagaa

SEQ ID NO: 49706 - DNA, 22 bp, Artificial Sequence
  chemically synthesized
actcattatcacaaggacggca

SEQ ID NO: 49707 - DNA, 22 bp, Artificial Sequence
  chemically synthesized
ctcattatcacaaggacggcac

SEQ ID NO: 49708 - DNA, 22 bp, Artificial Sequence
  chemically synthesized
attatcacaaggacggcaccaa

SEQ ID NO: 49709 - DNA, 22 bp, Artificial Sequence
  chemically synthesized
tcacaaggacggcaccaagcct

SEQ ID NO: 49710 - DNA, 22 bp, Artificial Sequence
  chemically synthesized
tcacaggggttcctcccccatg

SEQ ID NO: 49711 - DNA, 22 bp, Artificial Sequence
  chemically synthesized
cacaggggttcctcccccatga

SEQ ID NO: 49712 - DNA, 22 bp, Artificial Sequence
  chemically synthesized
acaggggttcctcccccatgac

SEQ ID NO: 49713 - DNA, 22 bp, Artificial Sequence
  chemically synthesized
ctcccccatgacccaaacacct

SEQ ID NO: 49714 - DNA, 22 bp, Artificial Sequence
  chemically synthesized
ccccatgacccaaacacctccc

SEQ ID NO: 49715 - DNA, 22 bp, Artificial Sequence
  chemically synthesized
ccattaggccccacttccaaca

SEQ ID NO: 49716 - DNA, 22 bp, Artificial Sequence
  chemically synthesized
ggccccacttccaacactgagg

SEQ ID NO: 49717 - DNA, 22 bp, Artificial Sequence
  chemically synthesized
ccaacactgaggaccaaatttc

SEQ ID NO: 49718 - DNA, 22 bp, Artificial Sequence
  chemically synthesized
caacactgaggaccaaatttcc

SEQ ID NO: 49719 - DNA, 22 bp, Artificial Sequence
  chemically synthesized
aggaccaaatttccacatgaga

SEQ ID NO: 49720 - DNA, 22 bp, Artificial Sequence
  chemically synthesized
ccacatgagatttggaggggac

SEQ ID NO: 49721 - DNA, 22 bp, Artificial Sequence
  chemically synthesized
cacatgagatttggaggggaca

SEQ ID NO: 49722 - DNA, 22 bp, Artificial Sequence
  chemically synthesized
ggaggggacaaacaaattatag

SEQ ID NO: 49723 - DNA, 22 bp, Artificial Sequence
  chemically synthesized
gaggggacaaacaaattatagc

SEQ ID NO: 49724 - DNA, 22 bp, Artificial Sequence
  chemically synthesized
tagcagccactatctatggtga

SEQ ID NO: 49725 - DNA, 22 bp, Artificial Sequence
  chemically synthesized
tctatggtgatttgtttggttt

SEQ ID NO: 49726 - DNA, 22 bp, Artificial Sequence
  chemically synthesized
tggtgatttgtttggtttttag

SEQ ID NO: 49727 - DNA, 22 bp, Artificial Sequence
  chemically synthesized
gtttggtttttagctcttgtct

SEQ ID NO: 49728 - DNA, 22 bp, Artificial Sequence
  chemically synthesized
tttggtttttagctcttgtctg

SEQ ID NO: 49729 - DNA, 22 bp, Artificial Sequence
  chemically synthesized
ggtttttagctcttgtctgctc

SEQ ID NO: 49730 - DNA, 22 bp, Artificial Sequence
  chemically synthesized
gtttttagctcttgtctgctcc

SEQ ID NO: 49731 - DNA, 22 bp, Artificial Sequence
  chemically synthesized
ttagctcttgtctgctccaact

SEQ ID NO: 49732 - DNA, 22 bp, Artificial Sequence
  chemically synthesized
tagctcttgtctgctccaactg

SEQ ID NO: 49733 - DNA, 22 bp, Artificial Sequence
  chemically synthesized
agctcttgtctgctccaactgc

SEQ ID NO: 49734 - DNA, 22 bp, Artificial Sequence
  chemically synthesized
gctcttgtctgctccaactgct

SEQ ID NO: 49735 - DNA, 22 bp, Artificial Sequence
  chemically synthesized
ttgtctgctccaactgctctca

SEQ ID NO: 49736 - DNA, 22 bp, Artificial Sequence
  chemically synthesized
gtctgctccaactgctctcagg

SEQ ID NO: 49737 - DNA, 22 bp, Artificial Sequence
  chemically synthesized
tctgctccaactgctctcaggc

SEQ ID NO: 49738 - DNA, 22 bp, Artificial Sequence
  chemically synthesized
ctccaactgctctcaggcagac

SEQ ID NO: 49739 - DNA, 22 bp, Artificial Sequence
  chemically synthesized
caactgctctcaggcagacata

SEQ ID NO: 49740 - DNA, 22 bp, Artificial Sequence
  chemically synthesized
ctctcaggcagacatacctgct

SEQ ID NO: 49741 - DNA, 22 bp, Artificial Sequence
  chemically synthesized
tcaggcagacatacctgcttaa

SEQ ID NO: 49742 - DNA, 22 bp, Artificial Sequence
  chemically synthesized
aggcagacatacctgcttaaga

SEQ ID NO: 49743 - DNA, 22 bp, Artificial Sequence
  chemically synthesized
cttaagaaccttcactggctcc

SEQ ID NO: 49744 - DNA, 22 bp, Artificial Sequence
  chemically synthesized
aagaaccttcactggctcccca

SEQ ID NO: 49745 - DNA, 22 bp, Artificial Sequence
  chemically synthesized
agaaccttcactggctccccac

SEQ ID NO: 49746 - DNA, 22 bp, Artificial Sequence
  chemically synthesized
cactggctccccacagcctcat

SEQ ID NO: 49747 - DNA, 22 bp, Artificial Sequence
  chemically synthesized
actggctccccacagcctcatg

SEQ ID NO: 49748 - DNA, 22 bp, Artificial Sequence
  chemically synthesized
gctccccacagcctcatgaatc

SEQ ID NO: 49749 - DNA, 22 bp, Artificial Sequence
  chemically synthesized
cccacagcctcatgaatcaagt

SEQ ID NO: 49750 - DNA, 22 bp, Artificial Sequence
  chemically synthesized
atgaatcaagtccaaactccat

SEQ ID NO: 49751 - DNA, 22 bp, Artificial Sequence
  chemically synthesized
catgctcctccttggcccctac

SEQ ID NO: 49752 - DNA, 22 bp, Artificial Sequence
  chemically synthesized
ctccttggcccctacctcaacc

SEQ ID NO: 49753 - DNA, 22 bp, Artificial Sequence
  chemically synthesized
cttggcccctacctcaacctac

SEQ ID NO: 49754 - DNA, 22 bp, Artificial Sequence
  chemically synthesized
ggcccctacctcaacctacctt

SEQ ID NO: 49755 - DNA, 22 bp, Artificial Sequence
  chemically synthesized
gcccctacctcaacctaccttg

SEQ ID NO: 49756 - DNA, 22 bp, Artificial Sequence
  chemically synthesized
cctcaacctaccttgcagcccc

SEQ ID NO: 49757 - DNA, 22 bp, Artificial Sequence
  chemically synthesized
aacctaccttgcagccccatca

SEQ ID NO: 49758 - DNA, 22 bp, Artificial Sequence
  chemically synthesized
ccttgcagccccatcacccata

SEQ ID NO: 49759 - DNA, 22 bp, Artificial Sequence
  chemically synthesized
gcagccccatcacccatatctc

SEQ ID NO: 49760 - DNA, 22 bp, Artificial Sequence
  chemically synthesized
cagccccatcacccatatctct

SEQ ID NO: 49761 - DNA, 22 bp, Artificial Sequence
  chemically synthesized
tgtatatatgcatcttggactc

SEQ ID NO: 49762 - DNA, 22 bp, Artificial Sequence
  chemically synthesized
tatatatgcatcttggactcca

SEQ ID NO: 49763 - DNA, 22 bp, Artificial Sequence
  chemically synthesized
ggactccagtcagagtagaaca

SEQ ID NO: 49764 - DNA, 22 bp, Artificial Sequence
  chemically synthesized
gactccagtcagagtagaacag

SEQ ID NO: 49765 - DNA, 22 bp, Artificial Sequence
  chemically synthesized
cagtcagagtagaacagagtcc

SEQ ID NO: 49766 - DNA, 22 bp, Artificial Sequence
  chemically synthesized
tacccaaagccttagggccaaa

SEQ ID NO: 49767 - DNA, 22 bp, Artificial Sequence
  chemically synthesized
acccaaagccttagggccaaaa

SEQ ID NO: 49768 - DNA, 22 bp, Artificial Sequence
  chemically synthesized
cccaaagccttagggccaaaac

SEQ ID NO: 49769 - DNA, 22 bp, Artificial Sequence
  chemically synthesized
agggccaaaacggttttgaacc

SEQ ID NO: 49770 - DNA, 22 bp, Artificial Sequence
  chemically synthesized
gggccaaaacggttttgaacct

SEQ ID NO: 49771 - DNA, 22 bp, Artificial Sequence
  chemically synthesized
tgaacctcagaacttgtttgga

SEQ ID NO: 49772 - DNA, 22 bp, Artificial Sequence
  chemically synthesized
gaacctcagaacttgtttggat

SEQ ID NO: 49773 - DNA, 22 bp, Artificial Sequence
  chemically synthesized
aacctcagaacttgtttggatt

SEQ ID NO: 49774 - DNA, 22 bp, Artificial Sequence
  chemically synthesized
agaacttgtttggattttagaa

SEQ ID NO: 49775 - DNA, 22 bp, Artificial Sequence
  chemically synthesized
gtttggattttagaaaggcagt

SEQ ID NO: 49776 - DNA, 22 bp, Artificial Sequence
  chemically synthesized
tttggattttagaaaggcagta

SEQ ID NO: 49777 - DNA, 22 bp, Artificial Sequence
  chemically synthesized
ggattttagaaaggcagtaatg

SEQ ID NO: 49778 - DNA, 22 bp, Artificial Sequence
  chemically synthesized
gattttagaaaggcagtaatgg

SEQ ID NO: 49779 - DNA, 22 bp, Artificial Sequence
  chemically synthesized
tagaaaggcagtaatgggcaat

SEQ ID NO: 49780 - DNA, 22 bp, Artificial Sequence
  chemically synthesized
agaaaggcagtaatgggcaatc

SEQ ID NO: 49781 - DNA, 22 bp, Artificial Sequence
  chemically synthesized
gaaaggcagtaatgggcaatca

SEQ ID NO: 49782 - DNA, 22 bp, Artificial Sequence
  chemically synthesized
cttggaagaatctggagctgca

SEQ ID NO: 49783 - DNA, 22 bp, Artificial Sequence
  chemically synthesized
ggaagaatctggagctgcatac

SEQ ID NO: 49784 - DNA, 22 bp, Artificial Sequence
  chemically synthesized
gaagaatctggagctgcatact

SEQ ID NO: 49785 - DNA, 22 bp, Artificial Sequence
  chemically synthesized
gagctgcatactgtaatctatg

SEQ ID NO: 49786 - DNA, 22 bp, Artificial Sequence
  chemically synthesized
catactgtaatctatgcagcaa

SEQ ID NO: 49787 - DNA, 22 bp, Artificial Sequence
  chemically synthesized
taatctatgcagcaaaatatat

SEQ ID NO: 49788 - DNA, 22 bp, Artificial Sequence
  chemically synthesized
tgcagcaaaatatatgaatatg

SEQ ID NO: 49789 - DNA, 22 bp, Artificial Sequence
  chemically synthesized
acacaactaaattaaaaataat

SEQ ID NO: 49790 - DNA, 22 bp, Artificial Sequence
  chemically synthesized
aattaaaaataatctcatgtca

SEQ ID NO: 49791 - DNA, 22 bp, Artificial Sequence
  chemically synthesized
aaaataatctcatgtcagttca

SEQ ID NO: 49792 - DNA, 22 bp, Artificial Sequence
  chemically synthesized
atgtcagttcacgtcaggtgct

SEQ ID NO: 49793 - DNA, 22 bp, Artificial Sequence
  chemically synthesized
acgtcaggtgctaccatcaaat

SEQ ID NO: 49794 - DNA, 22 bp, Artificial Sequence
  chemically synthesized
ccatcaaataaatcacaaaaaa

SEQ ID NO: 49795 - DNA, 22 bp, Artificial Sequence
  chemically synthesized
ttggttttcgtaacattttaca

SEQ ID NO: 49796 - DNA, 22 bp, Artificial Sequence
  chemically synthesized
tggttttcgtaacattttacat

SEQ ID NO: 49797 - DNA, 22 bp, Artificial Sequence
  chemically synthesized
ggttttcgtaacattttacatt

SEQ ID NO: 49798 - DNA, 22 bp, Artificial Sequence
  chemically synthesized
gttttcgtaacattttacattt

SEQ ID NO: 49799 - DNA, 22 bp, Artificial Sequence
  chemically synthesized
tcgtaacattttacatttcaga

SEQ ID NO: 49800 - DNA, 22 bp, Artificial Sequence
  chemically synthesized
cgtaacattttacatttcagac

SEQ ID NO: 49801 - DNA, 22 bp, Artificial Sequence
  chemically synthesized
gtaacattttacatttcagacg

SEQ ID NO: 49802 - DNA, 22 bp, Artificial Sequence
  chemically synthesized
tacatttcagacggtggataaa

SEQ ID NO: 49803 - DNA, 22 bp, Artificial Sequence
  chemically synthesized
acatttcagacggtggataaag

SEQ ID NO: 49804 - DNA, 22 bp, Artificial Sequence
  chemically synthesized
catttcagacggtggataaaga

SEQ ID NO: 49805 - DNA, 22 bp, Artificial Sequence
  chemically synthesized
cagacggtggataaagaactgt

SEQ ID NO: 49806 - DNA, 22 bp, Artificial Sequence
  chemically synthesized
agacggtggataaagaactgtg

SEQ ID NO: 49807 - DNA, 22 bp, Artificial Sequence
  chemically synthesized
tggaggccaggcgtggtggctc

SEQ ID NO: 49808 - DNA, 22 bp, Artificial Sequence
  chemically synthesized
acacctgtaattcgagcacttt

SEQ ID NO: 49809 - DNA, 22 bp, Artificial Sequence
  chemically synthesized
taattcgagcactttgggaggc

SEQ ID NO: 49810 - DNA, 22 bp, Artificial Sequence
  chemically synthesized
gagcactttgggaggctgaggc

SEQ ID NO: 49811 - DNA, 22 bp, Artificial Sequence
  chemically synthesized
tgggaggctgaggcgggaggat

SEQ ID NO: 49812 - DNA, 22 bp, Artificial Sequence
  chemically synthesized
gggaggctgaggcgggaggatc

SEQ ID NO: 49813 - DNA, 22 bp, Artificial Sequence
  chemically synthesized
ggaggctgaggcgggaggatca

SEQ ID NO: 49814 - DNA, 22 bp, Artificial Sequence
  chemically synthesized
aggcgggaggatcacctcctcg

SEQ ID NO: 49815 - DNA, 22 bp, Artificial Sequence
  chemically synthesized
ctcggatccactgaggaggtca

SEQ ID NO: 49816 - DNA, 22 bp, Artificial Sequence
  chemically synthesized
ggatccactgaggaggtcagga

SEQ ID NO: 49817 - DNA, 22 bp, Artificial Sequence
  chemically synthesized
aggaggtcaggagtttgcgact

SEQ ID NO: 49818 - DNA, 22 bp, Artificial Sequence
  chemically synthesized
gcgactagcctggccaacgtgg

SEQ ID NO: 49819 - DNA, 22 bp, Artificial Sequence
  chemically synthesized
cgactagcctggccaacgtggt

SEQ ID NO: 49820 - DNA, 22 bp, Artificial Sequence
  chemically synthesized
gcctggccaacgtggtgaaacc

SEQ ID NO: 49821 - DNA, 22 bp, Artificial Sequence
  chemically synthesized
gccaacgtggtgaaaccccttc

SEQ ID NO: 49822 - DNA, 22 bp, Artificial Sequence
  chemically synthesized
ctctactaaaaatacaaaaatt

SEQ ID NO: 49823 - DNA, 22 bp, Artificial Sequence
  chemically synthesized
tctactaaaaatacaaaaatta

SEQ ID NO: 49824 - DNA, 22 bp, Artificial Sequence
  chemically synthesized
tactaaaaatacaaaaattagc

SEQ ID NO: 49825 - DNA, 22 bp, Artificial Sequence
  chemically synthesized
ctaaaaatacaaaaattagccg

SEQ ID NO: 49826 - DNA, 22 bp, Artificial Sequence
  chemically synthesized
aaaatacaaaaattagccgggc

SEQ ID NO: 49827 - DNA, 22 bp, Artificial Sequence
  chemically synthesized
gccgggcgtggtggcaggtacc

SEQ ID NO: 49828 - DNA, 22 bp, Artificial Sequence
  chemically synthesized
taatcccagcttcttgggaggc

SEQ ID NO: 49829 - DNA, 22 bp, Artificial Sequence
  chemically synthesized
cttgggaggctgaggcaggaga

SEQ ID NO: 49830 - DNA, 22 bp, Artificial Sequence
  chemically synthesized
ttgggaggctgaggcaggagaa

SEQ ID NO: 49831 - DNA, 22 bp, Artificial Sequence
  chemically synthesized
gggaggctgaggcaggagaacc

SEQ ID NO: 49832 - DNA, 22 bp, Artificial Sequence
  chemically synthesized
ggaggctgaggcaggagaacca

SEQ ID NO: 49833 - DNA, 22 bp, Artificial Sequence
  chemically synthesized
aggcaggagaaccacttgaacc

SEQ ID NO: 49834 - DNA, 22 bp, Artificial Sequence
  chemically synthesized
gaacccgggagacagatgttgc

SEQ ID NO: 49835 - DNA, 22 bp, Artificial Sequence
  chemically synthesized
aacccgggagacagatgttgca

SEQ ID NO: 49836 - DNA, 22 bp, Artificial Sequence
  chemically synthesized
cagtgagctgagactgcaccat

SEQ ID NO: 49837 - DNA, 22 bp, Artificial Sequence
  chemically synthesized
agactgcaccattgcactccag

SEQ ID NO: 49838 - DNA, 22 bp, Artificial Sequence
  chemically synthesized
caccattgcactccagcctggg

SEQ ID NO: 49839 - DNA, 22 bp, Artificial Sequence
  chemically synthesized
cactccagcctgggcaacaaga

SEQ ID NO: 49840 - DNA, 22 bp, Artificial Sequence
  chemically synthesized
cagcctgggcaacaagagcgaa

SEQ ID NO: 49841 - DNA, 22 bp, Artificial Sequence
  chemically synthesized
ggcaacaagagcgaaactccat

SEQ ID NO: 49842 - DNA, 22 bp, Artificial Sequence
  chemically synthesized
catctcaaaaaaaaaagaaaaa

SEQ ID NO: 49843 - DNA, 22 bp, Artificial Sequence
  chemically synthesized
aaaaaaaaaagaaaaagaactg

SEQ ID NO: 49844 - DNA, 22 bp, Artificial Sequence
  chemically synthesized
tggacatgtgctccttatcttc

SEQ ID NO: 49845 - DNA, 22 bp, Artificial Sequence
  chemically synthesized
cttatcttccacctctggtttt

SEQ ID NO: 49846 - DNA, 22 bp, Artificial Sequence
  chemically synthesized
atcttccacctctggttttccc

SEQ ID NO: 49847 - DNA, 22 bp, Artificial Sequence
  chemically synthesized
tcttccacctctggttttccca

SEQ ID NO: 49848 - DNA, 22 bp, Artificial Sequence
  chemically synthesized
ccacctctggttttcccagctc

SEQ ID NO: 49849 - DNA, 22 bp, Artificial Sequence
  chemically synthesized
cacctctggttttcccagctct

SEQ ID NO: 49850 - DNA, 22 bp, Artificial Sequence
  chemically synthesized
tggttttcccagctctgtatct

SEQ ID NO: 49851 - DNA, 22 bp, Artificial Sequence
  chemically synthesized
gttttcccagctctgtatcttt

SEQ ID NO: 49852 - DNA, 22 bp, Artificial Sequence
  chemically synthesized
tcccagctctgtatctttgttc

SEQ ID NO: 49853 - DNA, 22 bp, Artificial Sequence
  chemically synthesized
cccagctctgtatctttgttca

SEQ ID NO: 49854 - DNA, 22 bp, Artificial Sequence
  chemically synthesized
ccagctctgtatctttgttcat

SEQ ID NO: 49855 - DNA, 22 bp, Artificial Sequence
  chemically synthesized
tgtatctttgttcatggtacct

SEQ ID NO: 49856 - DNA, 22 bp, Artificial Sequence
  chemically synthesized
tatctttgttcatggtacctcc

SEQ ID NO: 49857 - DNA, 22 bp, Artificial Sequence
  chemically synthesized
tgttcatggtacctcctaatcc

SEQ ID NO: 49858 - DNA, 22 bp, Artificial Sequence
  chemically synthesized
gttcatggtacctcctaatcct

SEQ ID NO: 49859 - DNA, 22 bp, Artificial Sequence
  chemically synthesized
ttcatggtacctcctaatccta

SEQ ID NO: 49860 - DNA, 22 bp, Artificial Sequence
  chemically synthesized
atggtacctcctaatcctagaa

SEQ ID NO: 49861 - DNA, 22 bp, Artificial Sequence
  chemically synthesized
ctaatcctagaataaaattctc

SEQ ID NO: 49862 - DNA, 22 bp, Artificial Sequence
  chemically synthesized
atcctagaataaaattctcatg

SEQ ID NO: 49863 - DNA, 22 bp, Artificial Sequence
  chemically synthesized
gaataaaattctcatgacacca

SEQ ID NO: 49864 - DNA, 22 bp, Artificial Sequence
  chemically synthesized
tcatgacaccatcatcgctgaa

SEQ ID NO: 49865 - DNA, 22 bp, Artificial Sequence
  chemically synthesized
atgacaccatcatcgctgaact

SEQ ID NO: 49866 - DNA, 22 bp, Artificial Sequence
  chemically synthesized
aactcctactaatgcttcaaag

SEQ ID NO: 49867 - DNA, 22 bp, Artificial Sequence
  chemically synthesized
ctactaatgcttcaaagaccca

SEQ ID NO: 49868 - DNA, 22 bp, Artificial Sequence
  chemically synthesized
ctaatgcttcaaagacccatct

SEQ ID NO: 49869 - DNA, 22 bp, Artificial Sequence
  chemically synthesized
atgcttcaaagacccatctgaa

SEQ ID NO: 49870 - DNA, 22 bp, Artificial Sequence
  chemically synthesized
caaagacccatctgaaaatgcc

SEQ ID NO: 49871 - DNA, 22 bp, Artificial Sequence
  chemically synthesized
aaagacccatctgaaaatgcct

SEQ ID NO: 49872 - DNA, 22 bp, Artificial Sequence
  chemically synthesized
aaaatgccttccgctaaataaa

SEQ ID NO: 49873 - DNA, 22 bp, Artificial Sequence
  chemically synthesized
ccgctaaataaaaattgaatga

SEQ ID NO: 49874 - DNA, 22 bp, Artificial Sequence
  chemically synthesized
cgctaaataaaaattgaatgaa

SEQ ID NO: 49875 - DNA, 22 bp, Artificial Sequence
  chemically synthesized
aataaaaattgaatgaattggg

SEQ ID NO: 49876 - DNA, 22 bp, Artificial Sequence
  chemically synthesized
aatgaattgggagagtactctg

SEQ ID NO: 49877 - DNA, 22 bp, Artificial Sequence
  chemically synthesized
ggagagtactctgtgcagtgga

SEQ ID NO: 49878 - DNA, 22 bp, Artificial Sequence
  chemically synthesized
tgtgcagtggagtgtcagttct

SEQ ID NO: 49879 - DNA, 22 bp, Artificial Sequence
  chemically synthesized
tgcagtggagtgtcagttctgg

SEQ ID NO: 49880 - DNA, 22 bp, Artificial Sequence
  chemically synthesized
tggaaacccagttctaatgcac

SEQ ID NO: 49881 - DNA, 22 bp, Artificial Sequence
  chemically synthesized
gaaacccagttctaatgcacct

SEQ ID NO: 49882 - DNA, 22 bp, Artificial Sequence
  chemically synthesized
taatgcacctggggtgacctcc

SEQ ID NO: 49883 - DNA, 22 bp, Artificial Sequence
  chemically synthesized
atgcacctggggtgacctcctc

SEQ ID NO: 49884 - DNA, 22 bp, Artificial Sequence
  chemically synthesized
gggtgacctcctctctctgggc

SEQ ID NO: 49885 - DNA, 22 bp, Artificial Sequence
  chemically synthesized
ctctctctgggcctcagtttct

SEQ ID NO: 49886 - DNA, 22 bp, Artificial Sequence
  chemically synthesized
tctctgggcctcagtttctcat

SEQ ID NO: 49887 - DNA, 22 bp, Artificial Sequence
  chemically synthesized
tctgggcctcagtttctcatga

SEQ ID NO: 49888 - DNA, 22 bp, Artificial Sequence
  chemically synthesized
tgggcctcagtttctcatgact

SEQ ID NO: 49889 - DNA, 22 bp, Artificial Sequence
  chemically synthesized
ggcctcagtttctcatgactaa

SEQ ID NO: 49890 - DNA, 22 bp, Artificial Sequence
  chemically synthesized
agtttctcatgactaaaagaaa

SEQ ID NO: 49891 - DNA, 22 bp, Artificial Sequence
  chemically synthesized
ctcatgactaaaagaaaaggat

SEQ ID NO: 49892 - DNA, 22 bp, Artificial Sequence
  chemically synthesized
tcatgactaaaagaaaaggatt

SEQ ID NO: 49893 - DNA, 22 bp, Artificial Sequence
  chemically synthesized
atgactaaaagaaaaggattgg

SEQ ID NO: 49894 - DNA, 22 bp, Artificial Sequence
  chemically synthesized
aaagaaaaggattggtctaaaa

SEQ ID NO: 49895 - DNA, 22 bp, Artificial Sequence
  chemically synthesized
gtctaaaaattattttctgctt

SEQ ID NO: 49896 - DNA, 22 bp, Artificial Sequence
  chemically synthesized
aaaattattttctgcttgccaa

SEQ ID NO: 49897 - DNA, 22 bp, Artificial Sequence
  chemically synthesized
ttttctgcttgccaaaaaatat

SEQ ID NO: 49898 - DNA, 22 bp, Artificial Sequence
  chemically synthesized
tctgcttgccaaaaaatatttt

SEQ ID NO: 49899 - DNA, 22 bp, Artificial Sequence
  chemically synthesized
ctgcttgccaaaaaatattttc

SEQ ID NO: 49900 - DNA, 22 bp, Artificial Sequence
  chemically synthesized
tgcttgccaaaaaatattttca

SEQ ID NO: 49901 - DNA, 22 bp, Artificial Sequence
  chemically synthesized
cttgccaaaaaatattttcatt

SEQ ID NO: 49902 - DNA, 22 bp, Artificial Sequence
  chemically synthesized
gccaaaaaatattttcattcta

SEQ ID NO: 49903 - DNA, 22 bp, Artificial Sequence
  chemically synthesized
ccaaaaaatattttcattctaa

SEQ ID NO: 49904 - DNA, 22 bp, Artificial Sequence
  chemically synthesized
tcattctaaattcgattcccac

SEQ ID NO: 49905 - DNA, 22 bp, Artificial Sequence
  chemically synthesized
cattctaaattcgattcccaca

SEQ ID NO: 49906 - DNA, 22 bp, Artificial Sequence
  chemically synthesized
attctaaattcgattcccacaa

SEQ ID NO: 49907 - DNA, 22 bp, Artificial Sequence
  chemically synthesized
taaattcgattcccacaaaata

SEQ ID NO: 49908 - DNA, 22 bp, Artificial Sequence
  chemically synthesized
aattcgattcccacaaaataac

SEQ ID NO: 49909 - DNA, 22 bp, Artificial Sequence
  chemically synthesized
gattcccacaaaataaccattg

SEQ ID NO: 49910 - DNA, 22 bp, Artificial Sequence
  chemically synthesized
ccacaaaataaccattgaatga

SEQ ID NO: 49911 - DNA, 22 bp, Artificial Sequence
  chemically synthesized
aatgaatgaataaatgaacttg

SEQ ID NO: 49912 - DNA, 22 bp, Artificial Sequence
  chemically synthesized
gaggaggctcctgttccaaact

SEQ ID NO: 49913 - DNA, 22 bp, Artificial Sequence
  chemically synthesized
aggaggctcctgttccaaactt

SEQ ID NO: 49914 - DNA, 22 bp, Artificial Sequence
  chemically synthesized
ctgttccaaacttccaccagag

SEQ ID NO: 49915 - DNA, 22 bp, Artificial Sequence
  chemically synthesized
ttccaaacttccaccagagaag

SEQ ID NO: 49916 - DNA, 22 bp, Artificial Sequence
  chemically synthesized
caaacttccaccagagaagaaa

SEQ ID NO: 49917 - DNA, 22 bp, Artificial Sequence
  chemically synthesized
ccaccagagaagaaacatcctc

SEQ ID NO: 49918 - DNA, 22 bp, Artificial Sequence
  chemically synthesized
caccagagaagaaacatcctca

SEQ ID NO: 49919 - DNA, 22 bp, Artificial Sequence
  chemically synthesized
aagggcttggttcaggtggtca

SEQ ID NO: 49920 - DNA, 22 bp, Artificial Sequence
  chemically synthesized
ggttcaggtggtcatacagcct

SEQ ID NO: 49921 - DNA, 22 bp, Artificial Sequence
  chemically synthesized
gttcaggtggtcatacagcctc

SEQ ID NO: 49922 - DNA, 22 bp, Artificial Sequence
  chemically synthesized
aggtggtcatacagcctctgct

SEQ ID NO: 49923 - DNA, 22 bp, Artificial Sequence
  chemically synthesized
tgcttactcacctctcaggatg

SEQ ID NO: 49924 - DNA, 22 bp, Artificial Sequence
  chemically synthesized
cttactcacctctcaggatggg

SEQ ID NO: 49925 - DNA, 22 bp, Artificial Sequence
  chemically synthesized
actcacctctcaggatggggta

SEQ ID NO: 49926 - DNA, 22 bp, Artificial Sequence
  chemically synthesized
ctcacctctcaggatggggtac

SEQ ID NO: 49927 - DNA, 22 bp, Artificial Sequence
  chemically synthesized
acctctcaggatggggtactca

SEQ ID NO: 49928 - DNA, 22 bp, Artificial Sequence
  chemically synthesized
tcaggatggggtactcactatt

SEQ ID NO: 49929 - DNA, 22 bp, Artificial Sequence
  chemically synthesized
aggatggggtactcactatttc

SEQ ID NO: 49930 - DNA, 22 bp, Artificial Sequence
  chemically synthesized
actatttccagaacagttgttt

SEQ ID NO: 49931 - DNA, 22 bp, Artificial Sequence
  chemically synthesized
tttccagaacagttgttttgga

SEQ ID NO: 49932 - DNA, 22 bp, Artificial Sequence
  chemically synthesized
ccagaacagttgttttggagca

SEQ ID NO: 49933 - DNA, 22 bp, Artificial Sequence
  chemically synthesized
cagaacagttgttttggagcag

SEQ ID NO: 49934 - DNA, 22 bp, Artificial Sequence
  chemically synthesized
ttttggagcagtggtaacttga

SEQ ID NO: 49935 - DNA, 22 bp, Artificial Sequence
  chemically synthesized
tggagcagtggtaacttgaaat

SEQ ID NO: 49936 - DNA, 22 bp, Artificial Sequence
  chemically synthesized
ggagcagtggtaacttgaaatg

SEQ ID NO: 49937 - DNA, 22 bp, Artificial Sequence
  chemically synthesized
gagcagtggtaacttgaaatgc

SEQ ID NO: 49938 - DNA, 22 bp, Artificial Sequence
  chemically synthesized
gaaatgccctttcttatcctgg

SEQ ID NO: 49939 - DNA, 22 bp, Artificial Sequence
  chemically synthesized
aaatgccctttcttatcctggc

SEQ ID NO: 49940 - DNA, 22 bp, Artificial Sequence
  chemically synthesized
tcttatcctggccacaacccca

SEQ ID NO: 49941 - DNA, 22 bp, Artificial Sequence
  chemically synthesized
cttatcctggccacaaccccac

SEQ ID NO: 49942 - DNA, 22 bp, Artificial Sequence
  chemically synthesized
ttatcctggccacaaccccaca

SEQ ID NO: 49943 - DNA, 22 bp, Artificial Sequence
  chemically synthesized
atcctggccacaaccccacaac

SEQ ID NO: 49944 - DNA, 22 bp, Artificial Sequence
  chemically synthesized
tcctggccacaaccccacaaca

SEQ ID NO: 49945 - DNA, 22 bp, Artificial Sequence
  chemically synthesized
gccacaaccccacaacatccct

SEQ ID NO: 49946 - DNA, 22 bp, Artificial Sequence
  chemically synthesized
gagaaagtcaaaggctcaggga

SEQ ID NO: 49947 - DNA, 22 bp, Artificial Sequence
  chemically synthesized
agggaacaaggaagagggctat

SEQ ID NO: 49948 - DNA, 22 bp, Artificial Sequence
  chemically synthesized
tactgagctgagtaaggacttg

SEQ ID NO: 49949 - DNA, 22 bp, Artificial Sequence
  chemically synthesized
agctgagtaaggacttgccatc

SEQ ID NO: 49950 - DNA, 22 bp, Artificial Sequence
  chemically synthesized
agtaaggacttgccatcctgcc

SEQ ID NO: 49951 - DNA, 22 bp, Artificial Sequence
  chemically synthesized
gccatcctgccacccagcacac

SEQ ID NO: 49952 - DNA, 22 bp, Artificial Sequence
  chemically synthesized
ccatcctgccacccagcacact

SEQ ID NO: 49953 - DNA, 22 bp, Artificial Sequence
  chemically synthesized
ccacccagcacactcagacaga

SEQ ID NO: 49954 - DNA, 22 bp, Artificial Sequence
  chemically synthesized
agacagaagcgtgggcaggcag

SEQ ID NO: 49955 - DNA, 22 bp, Artificial Sequence
  chemically synthesized
tgagtggcagaattttcccctc

SEQ ID NO: 49956 - DNA, 22 bp, Artificial Sequence
  chemically synthesized
tcccctctgccccaggagctgt

SEQ ID NO: 49957 - DNA, 22 bp, Artificial Sequence
  chemically synthesized
cccctctgccccaggagctgtg

SEQ ID NO: 49958 - DNA, 22 bp, Artificial Sequence
  chemically synthesized
ccctctgccccaggagctgtgg

SEQ ID NO: 49959 - DNA, 22 bp, Artificial Sequence
  chemically synthesized
tgccccaggagctgtggtttgg

SEQ ID NO: 49960 - DNA, 22 bp, Artificial Sequence
  chemically synthesized
ccccaggagctgtggtttggag

SEQ ID NO: 49961 - DNA, 22 bp, Artificial Sequence
  chemically synthesized
tggtttggagcaaagacaatgt

SEQ ID NO: 49962 - DNA, 22 bp, Artificial Sequence
  chemically synthesized
ggagcaaagacaatgtcaccaa

SEQ ID NO: 49963 - DNA, 22 bp, Artificial Sequence
  chemically synthesized
gagcaaagacaatgtcaccaac

SEQ ID NO: 49964 - DNA, 22 bp, Artificial Sequence
  chemically synthesized
cagacagggacaaaactgcaag

SEQ ID NO: 49965 - DNA, 22 bp, Artificial Sequence
  chemically synthesized
caagtgatccccccggggcttg

SEQ ID NO: 49966 - DNA, 22 bp, Artificial Sequence
  chemically synthesized
gcattgtaagttcactcatggt

SEQ ID NO: 49967 - DNA, 22 bp, Artificial Sequence
  chemically synthesized
cattgtaagttcactcatggtc

SEQ ID NO: 49968 - DNA, 22 bp, Artificial Sequence
  chemically synthesized
taagttcactcatggtcaacag

SEQ ID NO: 49969 - DNA, 22 bp, Artificial Sequence
  chemically synthesized
actcatggtcaacagaactttc

SEQ ID NO: 49970 - DNA, 22 bp, Artificial Sequence
  chemically synthesized
atggtcaacagaactttccctt

SEQ ID NO: 49971 - DNA, 22 bp, Artificial Sequence
  chemically synthesized
tcccttcatctccccatctgct

SEQ ID NO: 49972 - DNA, 22 bp, Artificial Sequence
  chemically synthesized
cccttcatctccccatctgctg

SEQ ID NO: 49973 - DNA, 22 bp, Artificial Sequence
  chemically synthesized
ccttcatctccccatctgctgc

SEQ ID NO: 49974 - DNA, 22 bp, Artificial Sequence
  chemically synthesized
catctccccatctgctgccact

SEQ ID NO: 49975 - DNA, 22 bp, Artificial Sequence
  chemically synthesized
atctccccatctgctgccactg

SEQ ID NO: 49976 - DNA, 22 bp, Artificial Sequence
  chemically synthesized
cccatctgctgccactgagccg

SEQ ID NO: 49977 - DNA, 22 bp, Artificial Sequence
  chemically synthesized
ctgccactgagccgtagggacg

SEQ ID NO: 49978 - DNA, 22 bp, Artificial Sequence
  chemically synthesized
ccactgagccgtagggacgatt

SEQ ID NO: 49979 - DNA, 22 bp, Artificial Sequence
  chemically synthesized
agccgtagggacgattgtcacc

SEQ ID NO: 49980 - DNA, 22 bp, Artificial Sequence
  chemically synthesized
tcacctcccttttaaagattag

SEQ ID NO: 49981 - DNA, 22 bp, Artificial Sequence
  chemically synthesized
ccttttaaagattaggcaatgg

SEQ ID NO: 49982 - DNA, 22 bp, Artificial Sequence
  chemically synthesized
ttaaagattaggcaatggaggc

SEQ ID NO: 49983 - DNA, 22 bp, Artificial Sequence
  chemically synthesized
taaagattaggcaatggaggct

SEQ ID NO: 49984 - DNA, 22 bp, Artificial Sequence
  chemically synthesized
aaagattaggcaatggaggctc

SEQ ID NO: 49985 - DNA, 22 bp, Artificial Sequence
  chemically synthesized
aagattaggcaatggaggctca

SEQ ID NO: 49986 - DNA, 22 bp, Artificial Sequence
  chemically synthesized
ggcaatggaggctcaaggataa

SEQ ID NO: 49987 - DNA, 22 bp, Artificial Sequence
  chemically synthesized
aaggataagtgacttgtcaagc

SEQ ID NO: 49988 - DNA, 22 bp, Artificial Sequence
  chemically synthesized
gtcaagcaccacagctagtgag

SEQ ID NO: 49989 - DNA, 22 bp, Artificial Sequence
  chemically synthesized
tcaagcaccacagctagtgaga

SEQ ID NO: 49990 - DNA, 22 bp, Artificial Sequence
  chemically synthesized
gtgagaggaagccaagattcaa

SEQ ID NO: 49991 - DNA, 22 bp, Artificial Sequence
  chemically synthesized
aaccccacatctgactccaagc

SEQ ID NO: 49992 - DNA, 22 bp, Artificial Sequence
  chemically synthesized
actccaagctgggggacacaga

SEQ ID NO: 49993 - DNA, 22 bp, Artificial Sequence
  chemically synthesized
caagctgggggacacagaacct

SEQ ID NO: 49994 - DNA, 22 bp, Artificial Sequence
  chemically synthesized
ggggacacagaacctcagccaa

SEQ ID NO: 49995 - DNA, 22 bp, Artificial Sequence
  chemically synthesized
agccaagtcctgggctggtaat

SEQ ID NO: 49996 - DNA, 22 bp, Artificial Sequence
  chemically synthesized
ggctggtaatacttagaaaaag

SEQ ID NO: 49997 - DNA, 22 bp, Artificial Sequence
  chemically synthesized
gtaatacttagaaaaagctagt

SEQ ID NO: 49998 - DNA, 22 bp, Artificial Sequence
  chemically synthesized
agaaaaagctagtggtctcgcc

SEQ ID NO: 49999 - DNA, 22 bp, Artificial Sequence
  chemically synthesized
gaaaaagctagtggtctcgccc

SEQ ID NO: 50000 - DNA, 22 bp, Artificial Sequence
  chemically synthesized
gtggtctcgccccgggaagaag

SEQ ID NO: 50001 - DNA, 22 bp, Artificial Sequence
  chemically synthesized
gccccgggaagaagcttcccac

SEQ ID NO: 50002 - DNA, 22 bp, Artificial Sequence
  chemically synthesized
cccacagcctgagggccagaag

SEQ ID NO: 50003 - DNA, 22 bp, Artificial Sequence
  chemically synthesized
ccacagcctgagggccagaagc

SEQ ID NO: 50004 - DNA, 22 bp, Artificial Sequence
  chemically synthesized
agggccagaagctggcagagtt

SEQ ID NO: 50005 - DNA, 22 bp, Artificial Sequence
  chemically synthesized
gcagagttgttgagcaaactcg

SEQ ID NO: 50006 - DNA, 22 bp, Artificial Sequence
  chemically synthesized
ttgagcaaactcgccccgcaca

SEQ ID NO: 50007 - DNA, 22 bp, Artificial Sequence
  chemically synthesized
agcaaactcgccccgcacacgg

SEQ ID NO: 50008 - DNA, 22 bp, Artificial Sequence
  chemically synthesized
gccccgcacacggtcggcagac

SEQ ID NO: 50009 - DNA, 22 bp, Artificial Sequence
  chemically synthesized
aggcgccgggctcagctccggg

SEQ ID NO: 50010 - DNA, 22 bp, Artificial Sequence
  chemically synthesized
agctccggggtcccagtaccag

SEQ ID NO: 50011 - DNA, 22 bp, Artificial Sequence
  chemically synthesized
cggggtcccagtaccaggcgca

SEQ ID NO: 50012 - DNA, 22 bp, Artificial Sequence
  chemically synthesized
cggctccagagcaccaagggcc

SEQ ID NO: 50013 - DNA, 22 bp, Artificial Sequence
  chemically synthesized
cagagcaccaagggcccttccc

SEQ ID NO: 50014 - DNA, 22 bp, Artificial Sequence
  chemically synthesized
ccctgcctgagtcctaaaggac

SEQ ID NO: 50015 - DNA, 22 bp, Artificial Sequence
  chemically synthesized
cctgcctgagtcctaaaggacg

SEQ ID NO: 50016 - DNA, 22 bp, Artificial Sequence
  chemically synthesized
cctgagtcctaaaggacgccaa

SEQ ID NO: 50017 - DNA, 22 bp, Artificial Sequence
  chemically synthesized
agtcctaaaggacgccaatggg

SEQ ID NO: 50018 - DNA, 22 bp, Artificial Sequence
  chemically synthesized
aaggacgccaatgggcctcgag

SEQ ID NO: 50019 - DNA, 22 bp, Artificial Sequence
  chemically synthesized
gagaatacctccgccccttctc

SEQ ID NO: 50020 - DNA, 22 bp, Artificial Sequence
  chemically synthesized
cgccccttctcccctgcccctt

SEQ ID NO: 50021 - DNA, 22 bp, Artificial Sequence
  chemically synthesized
ctcccctgccccttcagctggt

SEQ ID NO: 50022 - DNA, 22 bp, Artificial Sequence
  chemically synthesized
tcccctgccccttcagctggtt

SEQ ID NO: 50023 - DNA, 22 bp, Artificial Sequence
  chemically synthesized
ccctgccccttcagctggttct

SEQ ID NO: 50024 - DNA, 22 bp, Artificial Sequence
  chemically synthesized
ccccttcagctggttcttttct

SEQ ID NO: 50025 - DNA, 22 bp, Artificial Sequence
  chemically synthesized
cagctggttcttttcttcggct

SEQ ID NO: 50026 - DNA, 22 bp, Artificial Sequence
  chemically synthesized
agctggttcttttcttcggctg

SEQ ID NO: 50027 - DNA, 22 bp, Artificial Sequence
  chemically synthesized
gttcttttcttcggctgaaaca

SEQ ID NO: 50028 - DNA, 22 bp, Artificial Sequence
  chemically synthesized
ttttcttcggctgaaacagatg

SEQ ID NO: 50029 - DNA, 22 bp, Artificial Sequence
  chemically synthesized
ttcttcggctgaaacagatgga

SEQ ID NO: 50030 - DNA, 22 bp, Artificial Sequence
  chemically synthesized
tcttcggctgaaacagatggaa

SEQ ID NO: 50031 - DNA, 22 bp, Artificial Sequence
  chemically synthesized
cttcggctgaaacagatggaat

SEQ ID NO: 50032 - DNA, 22 bp, Artificial Sequence
  chemically synthesized
ttcggctgaaacagatggaata

SEQ ID NO: 50033 - DNA, 22 bp, Artificial Sequence
  chemically synthesized
cggctgaaacagatggaatact

SEQ ID NO: 50034 - DNA, 22 bp, Artificial Sequence
  chemically synthesized
ggctgaaacagatggaatacta

SEQ ID NO: 50035 - DNA, 22 bp, Artificial Sequence
  chemically synthesized
aaacagatggaatactagagca

SEQ ID NO: 50036 - DNA, 22 bp, Artificial Sequence
  chemically synthesized
gagcatgagttctgtgtcataa

SEQ ID NO: 50037 - DNA, 22 bp, Artificial Sequence
  chemically synthesized
tgtgtcataaagaaattgcctc

SEQ ID NO: 50038 - DNA, 22 bp, Artificial Sequence
  chemically synthesized
tgtcataaagaaattgcctcgt

SEQ ID NO: 50039 - DNA, 22 bp, Artificial Sequence
  chemically synthesized
cctcgtgctcccagcatctgcc

SEQ ID NO: 50040 - DNA, 22 bp, Artificial Sequence
  chemically synthesized
gtgctcccagcatctgccgtcc

SEQ ID NO: 50041 - DNA, 22 bp, Artificial Sequence
  chemically synthesized
ccagcatctgccgtccttccca

SEQ ID NO: 50042 - DNA, 22 bp, Artificial Sequence
  chemically synthesized
ccgtccttcccaccccgcccct

SEQ ID NO: 50043 - DNA, 22 bp, Artificial Sequence
  chemically synthesized
cccaccccgcccctgtctcggg

SEQ ID NO: 50044 - DNA, 22 bp, Artificial Sequence
  chemically synthesized
ccaccccgcccctgtctcgggt

SEQ ID NO: 50045 - DNA, 22 bp, Artificial Sequence
  chemically synthesized
tctcgggtagggccttctctcc

SEQ ID NO: 50046 - DNA, 22 bp, Artificial Sequence
  chemically synthesized
gggtagggccttctctccaggc

SEQ ID NO: 50047 - DNA, 22 bp, Artificial Sequence
  chemically synthesized
ctctccaggccctccaccctcc

SEQ ID NO: 50048 - DNA, 22 bp, Artificial Sequence
  chemically synthesized
tctccaggccctccaccctccg

SEQ ID NO: 50049 - DNA, 22 bp, Artificial Sequence
  chemically synthesized
tccaggccctccaccctccgct

SEQ ID NO: 50050 - DNA, 22 bp, Artificial Sequence
  chemically synthesized
caggccctccaccctccgctgc

SEQ ID NO: 50051 - DNA, 22 bp, Artificial Sequence
  chemically synthesized
caccctccgctgcccatgtttt

SEQ ID NO: 50052 - DNA, 22 bp, Artificial Sequence
  chemically synthesized
cgctgcccatgttttccaaacc

SEQ ID NO: 50053 - DNA, 22 bp, Artificial Sequence
  chemically synthesized
cccatgttttccaaaccaaatc

SEQ ID NO: 50054 - DNA, 22 bp, Artificial Sequence
  chemically synthesized
tccaaaccaaatcggaacccac

SEQ ID NO: 50055 - DNA, 22 bp, Artificial Sequence
  chemically synthesized
ccaaaccaaatcggaacccact

SEQ ID NO: 50056 - DNA, 22 bp, Artificial Sequence
  chemically synthesized
caaaccaaatcggaacccacta

SEQ ID NO: 50057 - DNA, 22 bp, Artificial Sequence
  chemically synthesized
taatggcaagcccgctttctct

SEQ ID NO: 50058 - DNA, 22 bp, Artificial Sequence
  chemically synthesized
tctctgtgcctggtgcagttcc

SEQ ID NO: 50059 - DNA, 22 bp, Artificial Sequence
  chemically synthesized
ctctgtgcctggtgcagttccc

SEQ ID NO: 50060 - DNA, 22 bp, Artificial Sequence
  chemically synthesized
tctgtgcctggtgcagttccca

SEQ ID NO: 50061 - DNA, 22 bp, Artificial Sequence
  chemically synthesized
tgtgcctggtgcagttcccagt

SEQ ID NO: 50062 - DNA, 22 bp, Artificial Sequence
  chemically synthesized
tgcctggtgcagttcccagtac

SEQ ID NO: 50063 - DNA, 22 bp, Artificial Sequence
  chemically synthesized
gtgcagttcccagtacgttcca

SEQ ID NO: 50064 - DNA, 22 bp, Artificial Sequence
  chemically synthesized
ccagtacgttccaggcattcac

SEQ ID NO: 50065 - DNA, 22 bp, Artificial Sequence
  chemically synthesized
caggcattcactccttcaccca

SEQ ID NO: 50066 - DNA, 22 bp, Artificial Sequence
  chemically synthesized
actccttcacccacctgtgccg

SEQ ID NO: 50067 - DNA, 22 bp, Artificial Sequence
  chemically synthesized
cttcacccacctgtgccgcggc

SEQ ID NO: 50068 - DNA, 22 bp, Artificial Sequence
  chemically synthesized
cacccacctgtgccgcggcgag

SEQ ID NO: 50069 - DNA, 22 bp, Artificial Sequence
  chemically synthesized
acccacctgtgccgcggcgagg

SEQ ID NO: 50070 - DNA, 22 bp, Artificial Sequence
  chemically synthesized
tgccgcggcgaggcagaaactg

SEQ ID NO: 50071 - DNA, 22 bp, Artificial Sequence
  chemically synthesized
ggaaatctgggcaggatatcct

SEQ ID NO: 50072 - DNA, 22 bp, Artificial Sequence
  chemically synthesized
ggcaggatatcctggcagtgct

SEQ ID NO: 50073 - DNA, 22 bp, Artificial Sequence
  chemically synthesized
gcagtgctctgctcgcccttcc

SEQ ID NO: 50074 - DNA, 22 bp, Artificial Sequence
  chemically synthesized
tgctcgcccttcctcggcctcc

SEQ ID NO: 50075 - DNA, 22 bp, Artificial Sequence
  chemically synthesized
ctcgcccttcctcggcctccgg

SEQ ID NO: 50076 - DNA, 22 bp, Artificial Sequence
  chemically synthesized
gcccttcctcggcctccgggtc

SEQ ID NO: 50077 - DNA, 22 bp, Artificial Sequence
  chemically synthesized
cctcggcctccgggtctcccaa

SEQ ID NO: 50078 - DNA, 22 bp, Artificial Sequence
  chemically synthesized
ctcggcctccgggtctcccaac

SEQ ID NO: 50079 - DNA, 22 bp, Artificial Sequence
  chemically synthesized
ggcctccgggtctcccaacccc

SEQ ID NO: 50080 - DNA, 22 bp, Artificial Sequence
  chemically synthesized
cgggtctcccaaccccgcgaac

SEQ ID NO: 50081 - DNA, 22 bp, Artificial Sequence
  chemically synthesized
ccaaccccgcgaaccttcccac

SEQ ID NO: 50082 - DNA, 22 bp, Artificial Sequence
  chemically synthesized
cccactgaatagcgcagccgca

SEQ ID NO: 50083 - DNA, 22 bp, Artificial Sequence
  chemically synthesized
ccactgaatagcgcagccgcac

SEQ ID NO: 50084 - DNA, 22 bp, Artificial Sequence
  chemically synthesized
aatagcgcagccgcacgcccca

SEQ ID NO: 50085 - DNA, 22 bp, Artificial Sequence
  chemically synthesized
tccaccgtgctccccactaccc

SEQ ID NO: 50086 - DNA, 22 bp, Artificial Sequence
  chemically synthesized
caccgtgctccccactacccgt

SEQ ID NO: 50087 - DNA, 22 bp, Artificial Sequence
  chemically synthesized
cccactacccgtcctcccccgc

SEQ ID NO: 50088 - DNA, 22 bp, Artificial Sequence
  chemically synthesized
cccgtcctcccccgccgccttg

SEQ ID NO: 50089 - DNA, 22 bp, Artificial Sequence
  chemically synthesized
ccccgccgccttgcctgcagtc

SEQ ID NO: 50090 - DNA, 22 bp, Artificial Sequence
  chemically synthesized
gcctgcagtccccaagatcgtg

SEQ ID NO: 50091 - DNA, 22 bp, Artificial Sequence
  chemically synthesized
cctgcagtccccaagatcgtgc

SEQ ID NO: 50092 - DNA, 22 bp, Artificial Sequence
  chemically synthesized
cagtccccaagatcgtgccaag

SEQ ID NO: 50093 - DNA, 22 bp, Artificial Sequence
  chemically synthesized
ggcgacctgcactccacttcct

SEQ ID NO: 50094 - DNA, 22 bp, Artificial Sequence
  chemically synthesized
cactccacttcctctcttacat

SEQ ID NO: 50095 - DNA, 22 bp, Artificial Sequence
  chemically synthesized
cacttcctctcttacatggggg

SEQ ID NO: 50096 - DNA, 22 bp, Artificial Sequence
  chemically synthesized
cctctcttacatggggggaaac

SEQ ID NO: 50097 - DNA, 22 bp, Artificial Sequence
  chemically synthesized
ctctcttacatggggggaaact

SEQ ID NO: 50098 - DNA, 22 bp, Artificial Sequence
  chemically synthesized
tcttacatggggggaaactgag

SEQ ID NO: 50099 - DNA, 22 bp, Artificial Sequence
  chemically synthesized
ttacatggggggaaactgaggc

SEQ ID NO: 50100 - DNA, 22 bp, Artificial Sequence
  chemically synthesized
acatggggggaaactgaggccc

SEQ ID NO: 50101 - DNA, 22 bp, Artificial Sequence
  chemically synthesized
catggggggaaactgaggcccg

SEQ ID NO: 50102 - DNA, 22 bp, Artificial Sequence
  chemically synthesized
aggcccgagaggaaacagcacc

SEQ ID NO: 50103 - DNA, 22 bp, Artificial Sequence
  chemically synthesized
cgggttcgccccggcctcccat

SEQ ID NO: 50104 - DNA, 22 bp, Artificial Sequence
  chemically synthesized
gccccggcctcccatccctaca

SEQ ID NO: 50105 - DNA, 22 bp, Artificial Sequence
  chemically synthesized
ccatccctacacccgcaccttg

SEQ ID NO: 50106 - DNA, 22 bp, Artificial Sequence
  chemically synthesized
cacccgcaccttggcgcagcgg

SEQ ID NO: 50107 - DNA, 22 bp, Artificial Sequence
  chemically synthesized
ggcgcagcggtggaaggtggct

SEQ ID NO: 50108 - DNA, 22 bp, Artificial Sequence
  chemically synthesized
gcgcagcggtggaaggtggctg

SEQ ID NO: 50109 - DNA, 22 bp, Artificial Sequence
  chemically synthesized
tggttccgtgctcgggtgcttc

SEQ ID NO: 50110 - DNA, 22 bp, Artificial Sequence
  chemically synthesized
cgtgctcgggtgcttcggccag

SEQ ID NO: 50111 - DNA, 22 bp, Artificial Sequence
  chemically synthesized
gggtgcttcggccaggccgtcc

SEQ ID NO: 50112 - DNA, 22 bp, Artificial Sequence
  chemically synthesized
cggccaggccgtcctcctcgga

SEQ ID NO: 50113 - DNA, 22 bp, Artificial Sequence
  chemically synthesized
ggccaggccgtcctcctcggaa

SEQ ID NO: 50114 - DNA, 22 bp, Artificial Sequence
  chemically synthesized
ctcggaacgcaaggctagcacc

SEQ ID NO: 50115 - DNA, 22 bp, Artificial Sequence
  chemically synthesized
ggaacgcaaggctagcaccagc

SEQ ID NO: 50116 - DNA, 22 bp, Artificial Sequence
  chemically synthesized
gcaccagctcctcgtagtcgcc

SEQ ID NO: 50117 - DNA, 22 bp, Artificial Sequence
  chemically synthesized
ctcgtagtcgccgtcctcgtcc

SEQ ID NO: 50118 - DNA, 22 bp, Artificial Sequence
  chemically synthesized
gtagtcgccgtcctcgtcctcc

SEQ ID NO: 50119 - DNA, 22 bp, Artificial Sequence
  chemically synthesized
gtcctcctgcgcacgggcgccc

SEQ ID NO: 50120 - DNA, 22 bp, Artificial Sequence
  chemically synthesized
ctgcgcacgggcgcccgcggga

SEQ ID NO: 50121 - DNA, 22 bp, Artificial Sequence
  chemically synthesized
cgcacgggcgcccgcgggaccc

SEQ ID NO: 50122 - DNA, 22 bp, Artificial Sequence
  chemically synthesized
gagctgacggtgcccatgaggg

SEQ ID NO: 50123 - DNA, 22 bp, Artificial Sequence
  chemically synthesized
acggtgcccatgagggccaggg

SEQ ID NO: 50124 - DNA, 22 bp, Artificial Sequence
  chemically synthesized
ctgtcctggcgaggagacctag

SEQ ID NO: 50125 - DNA, 22 bp, Artificial Sequence
  chemically synthesized
tcctggcgaggagacctagagg

SEQ ID NO: 50126 - DNA, 22 bp, Artificial Sequence
  chemically synthesized
gcgaggagacctagaggccgtg

SEQ ID NO: 50127 - DNA, 22 bp, Artificial Sequence
  chemically synthesized
gaggccgtgcgcggtccacgcc

SEQ ID NO: 50128 - DNA, 22 bp, Artificial Sequence
  chemically synthesized
gagccttgcggtggggaggact

SEQ ID NO: 50129 - DNA, 22 bp, Artificial Sequence
  chemically synthesized
agccttgcggtggggaggactg

SEQ ID NO: 50130 - DNA, 22 bp, Artificial Sequence
  chemically synthesized
gcggtggggaggactgtgcagg

SEQ ID NO: 50131 - DNA, 22 bp, Artificial Sequence
  chemically synthesized
cggtggggaggactgtgcagga

SEQ ID NO: 50132 - DNA, 22 bp, Artificial Sequence
  chemically synthesized
tgcaggagctgaagttcaggag

SEQ ID NO: 50133 - DNA, 22 bp, Artificial Sequence
  chemically synthesized
aagttcaggagcagggcgcgtg

SEQ ID NO: 50134 - DNA, 22 bp, Artificial Sequence
  chemically synthesized
aggagcagggcgcgtgaagggg

SEQ ID NO: 50135 - DNA, 22 bp, Artificial Sequence
  chemically synthesized
gctgggagctgggagccgctgc

SEQ ID NO: 50136 - DNA, 22 bp, Artificial Sequence
  chemically synthesized
ggagctgggagccgctgctgca

SEQ ID NO: 50137 - DNA, 22 bp, Artificial Sequence
  chemically synthesized
ggagccgctgctgcaacgacgc

SEQ ID NO: 50138 - DNA, 22 bp, Artificial Sequence
  chemically synthesized
ctgcaacgacgcgtcccggccc

SEQ ID NO: 50139 - DNA, 22 bp, Artificial Sequence
  chemically synthesized
caacgacgcgtcccggcccgcc

SEQ ID NO: 50140 - DNA, 22 bp, Artificial Sequence
  chemically synthesized
actgcctggctcactcctccag

SEQ ID NO: 50141 - DNA, 22 bp, Artificial Sequence
  chemically synthesized
cctggctcactcctccaggctc

SEQ ID NO: 50142 - DNA, 22 bp, Artificial Sequence
  chemically synthesized
gctcactcctccaggctcagac

SEQ ID NO: 50143 - DNA, 22 bp, Artificial Sequence
  chemically synthesized
actcctccaggctcagaccctg

SEQ ID NO: 50144 - DNA, 22 bp, Artificial Sequence
  chemically synthesized
ctccaggctcagaccctgaact

SEQ ID NO: 50145 - DNA, 22 bp, Artificial Sequence
  chemically synthesized
caggctcagaccctgaactgaa

SEQ ID NO: 50146 - DNA, 22 bp, Artificial Sequence
  chemically synthesized
agaccctgaactgaacggcggc

SEQ ID NO: 50147 - DNA, 22 bp, Artificial Sequence
  chemically synthesized
aactgaacggcggcgcccgcct

SEQ ID NO: 50148 - DNA, 22 bp, Artificial Sequence
  chemically synthesized
aacggcggcgcccgcctgcaac

SEQ ID NO: 50149 - DNA, 22 bp, Artificial Sequence
  chemically synthesized
caaccatgagcgcctcgacgtc

SEQ ID NO: 50150 - DNA, 22 bp, Artificial Sequence
  chemically synthesized
gacgtcgctgcggaaaccttct

SEQ ID NO: 50151 - DNA, 22 bp, Artificial Sequence
  chemically synthesized
cggaaaccttctagggtgtggg

SEQ ID NO: 50152 - DNA, 22 bp, Artificial Sequence
  chemically synthesized
ctagggtgtgggtgcttgacgc

SEQ ID NO: 50153 - DNA, 22 bp, Artificial Sequence
  chemically synthesized
tagggtgtgggtgcttgacgcc

SEQ ID NO: 50154 - DNA, 22 bp, Artificial Sequence
  chemically synthesized
gggtgtgggtgcttgacgcctg

SEQ ID NO: 50155 - DNA, 22 bp, Artificial Sequence
  chemically synthesized
gacgcctggggcgcgcagatca

SEQ ID NO: 50156 - DNA, 22 bp, Artificial Sequence
  chemically synthesized
acgcctggggcgcgcagatcac

SEQ ID NO: 50157 - DNA, 22 bp, Artificial Sequence
  chemically synthesized
gggcgcgcagatcacgccacca

SEQ ID NO: 50158 - DNA, 22 bp, Artificial Sequence
  chemically synthesized
tctgattaaacattaacggaac

SEQ ID NO: 50159 - DNA, 22 bp, Artificial Sequence
  chemically synthesized
attaaacattaacggaaccccc

SEQ ID NO: 50160 - DNA, 22 bp, Artificial Sequence
  chemically synthesized
aacattaacggaacccccggac

SEQ ID NO: 50161 - DNA, 22 bp, Artificial Sequence
  chemically synthesized
acggaacccccggactggagga

SEQ ID NO: 50162 - DNA, 22 bp, Artificial Sequence
  chemically synthesized
gaggatcaggtttcggcctcgc

SEQ ID NO: 50163 - DNA, 22 bp, Artificial Sequence
  chemically synthesized
cggcctcgccctccccaaacag

SEQ ID NO: 50164 - DNA, 22 bp, Artificial Sequence
  chemically synthesized
ggcctcgccctccccaaacagc

SEQ ID NO: 50165 - DNA, 22 bp, Artificial Sequence
  chemically synthesized
gccctccccaaacagcgtcaga

SEQ ID NO: 50166 - DNA, 22 bp, Artificial Sequence
  chemically synthesized
cccaaacagcgtcagattacgc

SEQ ID NO: 50167 - DNA, 22 bp, Artificial Sequence
  chemically synthesized
cgcgcagagggaagaaaaaact

SEQ ID NO: 50168 - DNA, 22 bp, Artificial Sequence
  chemically synthesized
ccaaatcctaactgggctggaa

SEQ ID NO: 50169 - DNA, 22 bp, Artificial Sequence
  chemically synthesized
actgggctggaaggcaggccgg

SEQ ID NO: 50170 - DNA, 22 bp, Artificial Sequence
  chemically synthesized
ggctggaaggcaggccggcgcc

SEQ ID NO: 50171 - DNA, 22 bp, Artificial Sequence
  chemically synthesized
gaaggcaggccggcgccctagg

SEQ ID NO: 50172 - DNA, 22 bp, Artificial Sequence
  chemically synthesized
ggggctcctcctctcccgcctc

SEQ ID NO: 50173 - DNA, 22 bp, Artificial Sequence
  chemically synthesized
ctcctctcccgcctctcaccct

SEQ ID NO: 50174 - DNA, 22 bp, Artificial Sequence
  chemically synthesized
ctctcccgcctctcaccctgcg

SEQ ID NO: 50175 - DNA, 22 bp, Artificial Sequence
  chemically synthesized
tcccgcctctcaccctgcgtgg

SEQ ID NO: 50176 - DNA, 22 bp, Artificial Sequence
  chemically synthesized
ccgcctctcaccctgcgtggga

SEQ ID NO: 50177 - DNA, 22 bp, Artificial Sequence
  chemically synthesized
tcaccctgcgtgggatgccaga

SEQ ID NO: 50178 - DNA, 22 bp, Artificial Sequence
  chemically synthesized
accctgcgtgggatgccagact

SEQ ID NO: 50179 - DNA, 22 bp, Artificial Sequence
  chemically synthesized
cgtgggatgccagactccaagt

SEQ ID NO: 50180 - DNA, 22 bp, Artificial Sequence
  chemically synthesized
caagttctgccgggcccacctt

SEQ ID NO: 50181 - DNA, 22 bp, Artificial Sequence
  chemically synthesized
tgccgggcccaccttttcagtg

SEQ ID NO: 50182 - DNA, 22 bp, Artificial Sequence
  chemically synthesized
ccgggcccaccttttcagtgtt

SEQ ID NO: 50183 - DNA, 22 bp, Artificial Sequence
  chemically synthesized
ttcagtgtttcctgggtccacc

SEQ ID NO: 50184 - DNA, 22 bp, Artificial Sequence
  chemically synthesized
tcagtgtttcctgggtccacct

SEQ ID NO: 50185 - DNA, 22 bp, Artificial Sequence
  chemically synthesized
cagtgtttcctgggtccacctt

SEQ ID NO: 50186 - DNA, 22 bp, Artificial Sequence
  chemically synthesized
agtgtttcctgggtccaccttg

SEQ ID NO: 50187 - DNA, 22 bp, Artificial Sequence
  chemically synthesized
cctgggtccaccttgtctcctg

SEQ ID NO: 50188 - DNA, 22 bp, Artificial Sequence
  chemically synthesized
ctgggtccaccttgtctcctgc

SEQ ID NO: 50189 - DNA, 22 bp, Artificial Sequence
  chemically synthesized
ggtccaccttgtctcctgctga

SEQ ID NO: 50190 - DNA, 22 bp, Artificial Sequence
  chemically synthesized
gtctcctgctgaccagtgagac

SEQ ID NO: 50191 - DNA, 22 bp, Artificial Sequence
  chemically synthesized
tctcctgctgaccagtgagact

SEQ ID NO: 50192 - DNA, 22 bp, Artificial Sequence
  chemically synthesized
ctgctgaccagtgagacttctg

SEQ ID NO: 50193 - DNA, 22 bp, Artificial Sequence
  chemically synthesized
ctgaccagtgagacttctgaat

SEQ ID NO: 50194 - DNA, 22 bp, Artificial Sequence
  chemically synthesized
accagtgagacttctgaatcaa

SEQ ID NO: 50195 - DNA, 22 bp, Artificial Sequence
  chemically synthesized
ctgaatcaatcctactgtggac

SEQ ID NO: 50196 - DNA, 22 bp, Artificial Sequence
  chemically synthesized
tgaatcaatcctactgtggact

SEQ ID NO: 50197 - DNA, 22 bp, Artificial Sequence
  chemically synthesized
aatcaatcctactgtggactcc

SEQ ID NO: 50198 - DNA, 22 bp, Artificial Sequence
  chemically synthesized
ctgtggactcctcgctgcccac

SEQ ID NO: 50199 - DNA, 22 bp, Artificial Sequence
  chemically synthesized
tggactcctcgctgcccaccga

SEQ ID NO: 50200 - DNA, 22 bp, Artificial Sequence
  chemically synthesized
ctcgctgcccaccgaattcttt

SEQ ID NO: 50201 - DNA, 22 bp, Artificial Sequence
  chemically synthesized
gctgcccaccgaattctttcca

SEQ ID NO: 50202 - DNA, 22 bp, Artificial Sequence
  chemically synthesized
cccaccgaattctttccactgg

SEQ ID NO: 50203 - DNA, 22 bp, Artificial Sequence
  chemically synthesized
tttccactggccttaacctggc

SEQ ID NO: 50204 - DNA, 22 bp, Artificial Sequence
  chemically synthesized
tccactggccttaacctggcag

SEQ ID NO: 50205 - DNA, 22 bp, Artificial Sequence
  chemically synthesized
ccactggccttaacctggcagc

SEQ ID NO: 50206 - DNA, 22 bp, Artificial Sequence
  chemically synthesized
cactggccttaacctggcagcc

SEQ ID NO: 50207 - DNA, 22 bp, Artificial Sequence
  chemically synthesized
gccttaacctggcagccttcta

SEQ ID NO: 50208 - DNA, 22 bp, Artificial Sequence
  chemically synthesized
aacctggcagccttctaaactt

SEQ ID NO: 50209 - DNA, 22 bp, Artificial Sequence
  chemically synthesized
acctggcagccttctaaactta

SEQ ID NO: 50210 - DNA, 22 bp, Artificial Sequence
  chemically synthesized
gcagccttctaaacttagcctg

SEQ ID NO: 50211 - DNA, 22 bp, Artificial Sequence
  chemically synthesized
ctaaacttagcctggaccccct

SEQ ID NO: 50212 - DNA, 22 bp, Artificial Sequence
  chemically synthesized
taaacttagcctggaccccctc

SEQ ID NO: 50213 - DNA, 22 bp, Artificial Sequence
  chemically synthesized
aacttagcctggaccccctccg

SEQ ID NO: 50214 - DNA, 22 bp, Artificial Sequence
  chemically synthesized
agcctggaccccctccggcctc

SEQ ID NO: 50215 - DNA, 22 bp, Artificial Sequence
  chemically synthesized
gcctggaccccctccggcctct

SEQ ID NO: 50216 - DNA, 22 bp, Artificial Sequence
  chemically synthesized
gaccccctccggcctctgccct

SEQ ID NO: 50217 - DNA, 22 bp, Artificial Sequence
  chemically synthesized
cggcctctgccctttatgcacc

SEQ ID NO: 50218 - DNA, 22 bp, Artificial Sequence
  chemically synthesized
tgccctttatgcaccctgcaca

SEQ ID NO: 50219 - DNA, 22 bp, Artificial Sequence
  chemically synthesized
ccctttatgcaccctgcacact

SEQ ID NO: 50220 - DNA, 22 bp, Artificial Sequence
  chemically synthesized
tatgcaccctgcacactgacct

SEQ ID NO: 50221 - DNA, 22 bp, Artificial Sequence
  chemically synthesized
atgcaccctgcacactgacctt

SEQ ID NO: 50222 - DNA, 22 bp, Artificial Sequence
  chemically synthesized
tgcaccctgcacactgacctta

SEQ ID NO: 50223 - DNA, 22 bp, Artificial Sequence
  chemically synthesized
cacactgaccttaccaactagc

SEQ ID NO: 50224 - DNA, 22 bp, Artificial Sequence
  chemically synthesized
accttaccaactagctgctcct

SEQ ID NO: 50225 - DNA, 22 bp, Artificial Sequence
  chemically synthesized
accaactagctgctccttgaag

SEQ ID NO: 50226 - DNA, 22 bp, Artificial Sequence
  chemically synthesized
ccaactagctgctccttgaaga

SEQ ID NO: 50227 - DNA, 22 bp, Artificial Sequence
  chemically synthesized
gctgctccttgaagagattgct

SEQ ID NO: 50228 - DNA, 22 bp, Artificial Sequence
  chemically synthesized
ctccttgaagagattgcttgct

SEQ ID NO: 50229 - DNA, 22 bp, Artificial Sequence
  chemically synthesized
cttgaagagattgcttgctttt

SEQ ID NO: 50230 - DNA, 22 bp, Artificial Sequence
  chemically synthesized
gaagagattgcttgcttttgat

SEQ ID NO: 50231 - DNA, 22 bp, Artificial Sequence
  chemically synthesized
aagagattgcttgcttttgatg

SEQ ID NO: 50232 - DNA, 22 bp, Artificial Sequence
  chemically synthesized
cttgcttttgatgtccagccta

SEQ ID NO: 50233 - DNA, 22 bp, Artificial Sequence
  chemically synthesized
gcttttgatgtccagcctacat

SEQ ID NO: 50234 - DNA, 22 bp, Artificial Sequence
  chemically synthesized
cttttgatgtccagcctacatg

SEQ ID NO: 50235 - DNA, 22 bp, Artificial Sequence
  chemically synthesized
ttgatgtccagcctacatgcat

SEQ ID NO: 50236 - DNA, 22 bp, Artificial Sequence
  chemically synthesized
tgatgtccagcctacatgcatt

SEQ ID NO: 50237 - DNA, 22 bp, Artificial Sequence
  chemically synthesized
gatgtccagcctacatgcattt

SEQ ID NO: 50238 - DNA, 22 bp, Artificial Sequence
  chemically synthesized
atgtccagcctacatgcatttc

SEQ ID NO: 50239 - DNA, 22 bp, Artificial Sequence
  chemically synthesized
catgcatttcaagggatttata

SEQ ID NO: 50240 - DNA, 22 bp, Artificial Sequence
  chemically synthesized
caagggatttatactacaaaga

SEQ ID NO: 50241 - DNA, 22 bp, Artificial Sequence
  chemically synthesized
aagggatttatactacaaagat

SEQ ID NO: 50242 - DNA, 22 bp, Artificial Sequence
  chemically synthesized
atactacaaagattcaggtttt

SEQ ID NO: 50243 - DNA, 22 bp, Artificial Sequence
  chemically synthesized
tactacaaagattcaggtttta

SEQ ID NO: 50244 - DNA, 22 bp, Artificial Sequence
  chemically synthesized
caaagattcaggttttaagttt

SEQ ID NO: 50245 - DNA, 22 bp, Artificial Sequence
  chemically synthesized
aggttttaagtttgcaaagacg

SEQ ID NO: 50246 - DNA, 22 bp, Artificial Sequence
  chemically synthesized
taagtttgcaaagacgtcatat

SEQ ID NO: 50247 - DNA, 22 bp, Artificial Sequence
  chemically synthesized
aagtttgcaaagacgtcatata

SEQ ID NO: 50248 - DNA, 22 bp, Artificial Sequence
  chemically synthesized
agtttgcaaagacgtcatatag

SEQ ID NO: 50249 - DNA, 22 bp, Artificial Sequence
  chemically synthesized
gcaaagacgtcatataggtaca

SEQ ID NO: 50250 - DNA, 22 bp, Artificial Sequence
  chemically synthesized
caaagacgtcatataggtacat

SEQ ID NO: 50251 - DNA, 22 bp, Artificial Sequence
  chemically synthesized
agaattctatggtaggcacaag

SEQ ID NO: 50252 - DNA, 22 bp, Artificial Sequence
  chemically synthesized
tatggtaggcacaagctcagct

SEQ ID NO: 50253 - DNA, 22 bp, Artificial Sequence
  chemically synthesized
tggtaggcacaagctcagcttt

SEQ ID NO: 50254 - DNA, 22 bp, Artificial Sequence
  chemically synthesized
agctttccagaagattcaattt

SEQ ID NO: 50255 - DNA, 22 bp, Artificial Sequence
  chemically synthesized
tccagaagattcaatttgcaaa

SEQ ID NO: 50256 - DNA, 22 bp, Artificial Sequence
  chemically synthesized
ccagaagattcaatttgcaaag

SEQ ID NO: 50257 - DNA, 22 bp, Artificial Sequence
  chemically synthesized
cagaagattcaatttgcaaaga

SEQ ID NO: 50258 - DNA, 22 bp, Artificial Sequence
  chemically synthesized
aatttgcaaagattccttttac

SEQ ID NO: 50259 - DNA, 22 bp, Artificial Sequence
  chemically synthesized
gcaaagattccttttacacacc

SEQ ID NO: 50260 - DNA, 22 bp, Artificial Sequence
  chemically synthesized
caaagattccttttacacacca

SEQ ID NO: 50261 - DNA, 22 bp, Artificial Sequence
  chemically synthesized
cttttacacaccatgttcaaga

SEQ ID NO: 50262 - DNA, 22 bp, Artificial Sequence
  chemically synthesized
ttacacaccatgttcaagaaat

SEQ ID NO: 50263 - DNA, 22 bp, Artificial Sequence
  chemically synthesized
tacacaccatgttcaagaaatc

SEQ ID NO: 50264 - DNA, 22 bp, Artificial Sequence
  chemically synthesized
acacaccatgttcaagaaatca

SEQ ID NO: 50265 - DNA, 22 bp, Artificial Sequence
  chemically synthesized
cacaccatgttcaagaaatcaa

SEQ ID NO: 50266 - DNA, 22 bp, Artificial Sequence
  chemically synthesized
aagaaatcaactggacaagcat

SEQ ID NO: 50267 - DNA, 22 bp, Artificial Sequence
  chemically synthesized
gacaagcatccagtaaacacct

SEQ ID NO: 50268 - DNA, 22 bp, Artificial Sequence
  chemically synthesized
ttgtgtaccaggcaggaggatg

SEQ ID NO: 50269 - DNA, 22 bp, Artificial Sequence
  chemically synthesized
tgtaccaggcaggaggatgaaa

SEQ ID NO: 50270 - DNA, 22 bp, Artificial Sequence
  chemically synthesized
ctggcctcagattgtacatgtg

SEQ ID NO: 50271 - DNA, 22 bp, Artificial Sequence
  chemically synthesized
gcctcagattgtacatgtggca

SEQ ID NO: 50272 - DNA, 22 bp, Artificial Sequence
  chemically synthesized
agattgtacatgtggcatgaca

SEQ ID NO: 50273 - DNA, 22 bp, Artificial Sequence
  chemically synthesized
tacatgtggcatgacatgaggc

SEQ ID NO: 50274 - DNA, 22 bp, Artificial Sequence
  chemically synthesized
gctctttctggaagggctgtcg

SEQ ID NO: 50275 - DNA, 22 bp, Artificial Sequence
  chemically synthesized
ctctttctggaagggctgtcga

SEQ ID NO: 50276 - DNA, 22 bp, Artificial Sequence
  chemically synthesized
tttctggaagggctgtcgatac

SEQ ID NO: 50277 - DNA, 22 bp, Artificial Sequence
  chemically synthesized
tctggaagggctgtcgatactg

SEQ ID NO: 50278 - DNA, 22 bp, Artificial Sequence
  chemically synthesized
ctggaagggctgtcgatactgg

SEQ ID NO: 50279 - DNA, 22 bp, Artificial Sequence
  chemically synthesized
tggaagggctgtcgatactggg

SEQ ID NO: 50280 - DNA, 22 bp, Artificial Sequence
  chemically synthesized
gaagggctgtcgatactgggaa

SEQ ID NO: 50281 - DNA, 22 bp, Artificial Sequence
  chemically synthesized
tcgatactgggaagaaacaaag

SEQ ID NO: 50282 - DNA, 22 bp, Artificial Sequence
  chemically synthesized
ggaagaaacaaaggcgaattta

SEQ ID NO: 50283 - DNA, 22 bp, Artificial Sequence
  chemically synthesized
atgatcctcccttgcagatgca

SEQ ID NO: 50284 - DNA, 22 bp, Artificial Sequence
  chemically synthesized
tgatcctcccttgcagatgcac

SEQ ID NO: 50285 - DNA, 22 bp, Artificial Sequence
  chemically synthesized
ccttgcagatgcacagcagatt

SEQ ID NO: 50286 - DNA, 22 bp, Artificial Sequence
  chemically synthesized
gcagatgcacagcagattccga

SEQ ID NO: 50287 - DNA, 22 bp, Artificial Sequence
  chemically synthesized
cagatgcacagcagattccgag

SEQ ID NO: 50288 - DNA, 22 bp, Artificial Sequence
  chemically synthesized
cgagtgaaatggcctgctctga

SEQ ID NO: 50289 - DNA, 22 bp, Artificial Sequence
  chemically synthesized
ctctgaatctaggtgctggagt

SEQ ID NO: 50290 - DNA, 22 bp, Artificial Sequence
  chemically synthesized
tgaatctaggtgctggagtcca

SEQ ID NO: 50291 - DNA, 22 bp, Artificial Sequence
  chemically synthesized
aatctaggtgctggagtccaaa

SEQ ID NO: 50292 - DNA, 22 bp, Artificial Sequence
  chemically synthesized
ggtgctggagtccaaagttgat

SEQ ID NO: 50293 - DNA, 22 bp, Artificial Sequence
  chemically synthesized
gagtccaaagttgatgctcttt

SEQ ID NO: 50294 - DNA, 22 bp, Artificial Sequence
  chemically synthesized
atgctctttccactttgtttgc

SEQ ID NO: 50295 - DNA, 22 bp, Artificial Sequence
  chemically synthesized
tttccactttgtttgcaaagac

SEQ ID NO: 50296 - DNA, 22 bp, Artificial Sequence
  chemically synthesized
tccactttgtttgcaaagacct

SEQ ID NO: 50297 - DNA, 22 bp, Artificial Sequence
  chemically synthesized
ccactttgtttgcaaagacctc

SEQ ID NO: 50298 - DNA, 22 bp, Artificial Sequence
  chemically synthesized
cactttgtttgcaaagacctca

SEQ ID NO: 50299 - DNA, 22 bp, Artificial Sequence
  chemically synthesized
tgtttgcaaagacctcactcca

SEQ ID NO: 50300 - DNA, 22 bp, Artificial Sequence
  chemically synthesized
gtttgcaaagacctcactccag

SEQ ID NO: 50301 - DNA, 22 bp, Artificial Sequence
  chemically synthesized
tttgcaaagacctcactccaga

SEQ ID NO: 50302 - DNA, 22 bp, Artificial Sequence
  chemically synthesized
gcaaagacctcactccagagag

SEQ ID NO: 50303 - DNA, 22 bp, Artificial Sequence
  chemically synthesized
caaagacctcactccagagagc

SEQ ID NO: 50304 - DNA, 22 bp, Artificial Sequence
  chemically synthesized
actccagagagccagtgcacaa

SEQ ID NO: 50305 - DNA, 22 bp, Artificial Sequence
  chemically synthesized
cagagagccagtgcacaaagac

SEQ ID NO: 50306 - DNA, 22 bp, Artificial Sequence
  chemically synthesized
acagtgactccatgaggtaagg

SEQ ID NO: 50307 - DNA, 22 bp, Artificial Sequence
  chemically synthesized
catgaggtaaggtcagagttat

SEQ ID NO: 50308 - DNA, 22 bp, Artificial Sequence
  chemically synthesized
tccccatcgagcccgccatcgc

SEQ ID NO: 50309 - DNA, 22 bp, Artificial Sequence
  chemically synthesized
atggtttgctgacagaggtggc

SEQ ID NO: 50310 - DNA, 22 bp, Artificial Sequence
  chemically synthesized
gctgacagaggtggcagaggtg

SEQ ID NO: 50311 - DNA, 22 bp, Artificial Sequence
  chemically synthesized
ctgacagaggtggcagaggtgg

SEQ ID NO: 50312 - DNA, 22 bp, Artificial Sequence
  chemically synthesized
acagaggtggcagaggtggttc

SEQ ID NO: 50313 - DNA, 22 bp, Artificial Sequence
  chemically synthesized
tccttcctgttgcctgtaattg

SEQ ID NO: 50314 - DNA, 22 bp, Artificial Sequence
  chemically synthesized
cttcctgttgcctgtaattgga

SEQ ID NO: 50315 - DNA, 22 bp, Artificial Sequence
  chemically synthesized
cctgttgcctgtaattggaatt

SEQ ID NO: 50316 - DNA, 22 bp, Artificial Sequence
  chemically synthesized
ctgttgcctgtaattggaattg

SEQ ID NO: 50317 - DNA, 22 bp, Artificial Sequence
  chemically synthesized
ttgcctgtaattggaattgtat

SEQ ID NO: 50318 - DNA, 22 bp, Artificial Sequence
  chemically synthesized
cctgtaattggaattgtatttg

SEQ ID NO: 50319 - DNA, 22 bp, Artificial Sequence
  chemically synthesized
taattggaattgtatttgcaat

SEQ ID NO: 50320 - DNA, 22 bp, Artificial Sequence
  chemically synthesized
gaattgtatttgcaatgtgctt

SEQ ID NO: 50321 - DNA, 22 bp, Artificial Sequence
  chemically synthesized
tatttgcaatgtgcttttggca

SEQ ID NO: 50322 - DNA, 22 bp, Artificial Sequence
  chemically synthesized
gcaatgtgcttttggcagcttc

SEQ ID NO: 50323 - DNA, 22 bp, Artificial Sequence
  chemically synthesized
caatgtgcttttggcagcttcc

SEQ ID NO: 50324 - DNA, 22 bp, Artificial Sequence
  chemically synthesized
ttggcagcttcctcatcaaagg

SEQ ID NO: 50325 - DNA, 22 bp, Artificial Sequence
  chemically synthesized
tggcagcttcctcatcaaaggc

SEQ ID NO: 50326 - DNA, 22 bp, Artificial Sequence
  chemically synthesized
ggcagcttcctcatcaaaggcc

SEQ ID NO: 50327 - DNA, 22 bp, Artificial Sequence
  chemically synthesized
gcagcttcctcatcaaaggcct

SEQ ID NO: 50328 - DNA, 22 bp, Artificial Sequence
  chemically synthesized
cctcatcaaaggcctcccctgg

SEQ ID NO: 50329 - DNA, 22 bp, Artificial Sequence
  chemically synthesized
ctcatcaaaggcctcccctgga

SEQ ID NO: 50330 - DNA, 22 bp, Artificial Sequence
  chemically synthesized
atcaaaggcctcccctggagca

SEQ ID NO: 50331 - DNA, 22 bp, Artificial Sequence
  chemically synthesized
ccctggagcaagaatagatggg

SEQ ID NO: 50332 - DNA, 22 bp, Artificial Sequence
  chemically synthesized
gagcaagaatagatgggagcta

SEQ ID NO: 50333 - DNA, 22 bp, Artificial Sequence
  chemically synthesized
actttccctgctgctccccttt

SEQ ID NO: 50334 - DNA, 22 bp, Artificial Sequence
  chemically synthesized
tccctgctgctcccctttggga

SEQ ID NO: 50335 - DNA, 22 bp, Artificial Sequence
  chemically synthesized
ccctgctgctcccctttgggac

SEQ ID NO: 50336 - DNA, 22 bp, Artificial Sequence
  chemically synthesized
cctgctgctcccctttgggacc

SEQ ID NO: 50337 - DNA, 22 bp, Artificial Sequence
  chemically synthesized
ctgctcccctttgggaccttgg

SEQ ID NO: 50338 - DNA, 22 bp, Artificial Sequence
  chemically synthesized
ctcccctttgggaccttggcct

SEQ ID NO: 50339 - DNA, 22 bp, Artificial Sequence
  chemically synthesized
ccctttgggaccttggcctctc

SEQ ID NO: 50340 - DNA, 22 bp, Artificial Sequence
  chemically synthesized
tgggaccttggcctctcaccta

SEQ ID NO: 50341 - DNA, 22 bp, Artificial Sequence
  chemically synthesized
gggaccttggcctctcacctac

SEQ ID NO: 50342 - DNA, 22 bp, Artificial Sequence
  chemically synthesized
ggaccttggcctctcacctacc

SEQ ID NO: 50343 - DNA, 22 bp, Artificial Sequence
  chemically synthesized
ggcctctcacctaccggggtcg

SEQ ID NO: 50344 - DNA, 22 bp, Artificial Sequence
  chemically synthesized
gcctctcacctaccggggtcgt

SEQ ID NO: 50345 - DNA, 20 bp, Artificial Sequence
  chemically synthesized
gtaaggctgaggcctggcac

SEQ ID NO: 50346 - DNA, 20 bp, Artificial Sequence
  chemically synthesized
gcctggcacaggtctgttcc

SEQ ID NO: 50347 - DNA, 20 bp, Artificial Sequence
  chemically synthesized
ggtctgttcctggtcatatc

SEQ ID NO: 50348 - DNA, 20 bp, Artificial Sequence
  chemically synthesized
tctgttcctggtcatatctg

SEQ ID NO: 50349 - DNA, 20 bp, Artificial Sequence
  chemically synthesized
ctgttcctggtcatatctgg

SEQ ID NO: 50350 - DNA, 20 bp, Artificial Sequence
  chemically synthesized
tgttcctggtcatatctgga

SEQ ID NO: 50351 - DNA, 20 bp, Artificial Sequence
  chemically synthesized
gttcctggtcatatctggag

SEQ ID NO: 50352 - DNA, 20 bp, Artificial Sequence
  chemically synthesized
ctggtcatatctggagggga

SEQ ID NO: 50353 - DNA, 20 bp, Artificial Sequence
  chemically synthesized
ggtcatatctggaggggatg

SEQ ID NO: 50354 - DNA, 20 bp, Artificial Sequence
  chemically synthesized
ctggaggggatggagaatgt

SEQ ID NO: 50355 - DNA, 20 bp, Artificial Sequence
  chemically synthesized
aggggatggagaatgtgagc

SEQ ID NO: 50356 - DNA, 20 bp, Artificial Sequence
  chemically synthesized
cgttcctccccacccctctc

SEQ ID NO: 50357 - DNA, 20 bp, Artificial Sequence
  chemically synthesized
gaccttaacctcctcatcta

SEQ ID NO: 50358 - DNA, 20 bp, Artificial Sequence
  chemically synthesized
cttaacctcctcatctatag

SEQ ID NO: 50359 - DNA, 20 bp, Artificial Sequence
  chemically synthesized
ttaacctcctcatctataga

SEQ ID NO: 50360 - DNA, 20 bp, Artificial Sequence
  chemically synthesized
taacctcctcatctatagaa

SEQ ID NO: 50361 - DNA, 20 bp, Artificial Sequence
  chemically synthesized
aacctcctcatctatagaag

SEQ ID NO: 50362 - DNA, 20 bp, Artificial Sequence
  chemically synthesized
cctcctcatctatagaaggg

SEQ ID NO: 50363 - DNA, 20 bp, Artificial Sequence
  chemically synthesized
ctcatctatagaaggggaga

SEQ ID NO: 50364 - DNA, 20 bp, Artificial Sequence
  chemically synthesized
ggggagaaagatgcatgccc

SEQ ID NO: 50365 - DNA, 20 bp, Artificial Sequence
  chemically synthesized
gagaaagatgcatgcccaag

SEQ ID NO: 50366 - DNA, 20 bp, Artificial Sequence
  chemically synthesized
aaagatgcatgcccaagcag

SEQ ID NO: 50367 - DNA, 20 bp, Artificial Sequence
  chemically synthesized
aagatgcatgcccaagcagt

SEQ ID NO: 50368 - DNA, 20 bp, Artificial Sequence
  chemically synthesized
gatgcatgcccaagcagtag

SEQ ID NO: 50369 - DNA, 20 bp, Artificial Sequence
  chemically synthesized
tgcatgcccaagcagtagga

SEQ ID NO: 50370 - DNA, 20 bp, Artificial Sequence
  chemically synthesized
gcatgcccaagcagtaggag

SEQ ID NO: 50371 - DNA, 20 bp, Artificial Sequence
  chemically synthesized
tgcccaagcagtaggagagg

SEQ ID NO: 50372 - DNA, 20 bp, Artificial Sequence
  chemically synthesized
caagcagtaggagaggtggt

SEQ ID NO: 50373 - DNA, 20 bp, Artificial Sequence
  chemically synthesized
aagcagtaggagaggtggtg

SEQ ID NO: 50374 - DNA, 20 bp, Artificial Sequence
  chemically synthesized
aggagaggtggtgaggctta

SEQ ID NO: 50375 - DNA, 20 bp, Artificial Sequence
  chemically synthesized
ggagaggtggtgaggcttat

SEQ ID NO: 50376 - DNA, 20 bp, Artificial Sequence
  chemically synthesized
agaggtggtgaggcttatag

SEQ ID NO: 50377 - DNA, 20 bp, Artificial Sequence
  chemically synthesized
gtgaggcttataggagacaa

SEQ ID NO: 50378 - DNA, 20 bp, Artificial Sequence
  chemically synthesized
ggcttataggagacaacaga

SEQ ID NO: 50379 - DNA, 20 bp, Artificial Sequence
  chemically synthesized
gcttataggagacaacagac

SEQ ID NO: 50380 - DNA, 20 bp, Artificial Sequence
  chemically synthesized
ttataggagacaacagacag

SEQ ID NO: 50381 - DNA, 20 bp, Artificial Sequence
  chemically synthesized
caacagacaggagcccccga

SEQ ID NO: 50382 - DNA, 20 bp, Artificial Sequence
  chemically synthesized
agacaggagcccccgacaga

SEQ ID NO: 50383 - DNA, 20 bp, Artificial Sequence
  chemically synthesized
acaggagcccccgacagaca

SEQ ID NO: 50384 - DNA, 20 bp, Artificial Sequence
  chemically synthesized
caggagcccccgacagacag

SEQ ID NO: 50385 - DNA, 20 bp, Artificial Sequence
  chemically synthesized
ggagcccccgacagacagag

SEQ ID NO: 50386 - DNA, 20 bp, Artificial Sequence
  chemically synthesized
agacagaggagctgtgcaaa

SEQ ID NO: 50387 - DNA, 20 bp, Artificial Sequence
  chemically synthesized
agaggagctgtgcaaacaga

SEQ ID NO: 50388 - DNA, 20 bp, Artificial Sequence
  chemically synthesized
gctgtgcaaacagaaagaaa

SEQ ID NO: 50389 - DNA, 20 bp, Artificial Sequence
  chemically synthesized
ttgttgctgttgctgtatct

SEQ ID NO: 50390 - DNA, 20 bp, Artificial Sequence
  chemically synthesized
tgctgttgctgtatcttggc

SEQ ID NO: 50391 - DNA, 20 bp, Artificial Sequence
  chemically synthesized
ttggctggtgtcccccatcc

SEQ ID NO: 50392 - DNA, 20 bp, Artificial Sequence
  chemically synthesized
tggctggtgtcccccatcct

SEQ ID NO: 50393 - DNA, 20 bp, Artificial Sequence
  chemically synthesized
ggctggtgtcccccatcctg

SEQ ID NO: 50394 - DNA, 20 bp, Artificial Sequence
  chemically synthesized
tgtcccccatcctggggtgc

SEQ ID NO: 50395 - DNA, 20 bp, Artificial Sequence
  chemically synthesized
gtcccccatcctggggtgcc

SEQ ID NO: 50396 - DNA, 20 bp, Artificial Sequence
  chemically synthesized
atcctggggtgccaggactg

SEQ ID NO: 50397 - DNA, 20 bp, Artificial Sequence
  chemically synthesized
gggtgccaggactgcagacc

SEQ ID NO: 50398 - DNA, 20 bp, Artificial Sequence
  chemically synthesized
ccctcatccacttctgctta

SEQ ID NO: 50399 - DNA, 20 bp, Artificial Sequence
  chemically synthesized
cctcatccacttctgcttac

SEQ ID NO: 50400 - DNA, 20 bp, Artificial Sequence
  chemically synthesized
ccacttctgcttacaggaac

SEQ ID NO: 50401 - DNA, 20 bp, Artificial Sequence
  chemically synthesized
acaggaaccagtgtatccac

SEQ ID NO: 50402 - DNA, 20 bp, Artificial Sequence
  chemically synthesized
caggaaccagtgtatccacc

SEQ ID NO: 50403 - DNA, 20 bp, Artificial Sequence
  chemically synthesized
ggaaccagtgtatccaccag

SEQ ID NO: 50404 - DNA, 20 bp, Artificial Sequence
  chemically synthesized
gaaccagtgtatccaccagg

SEQ ID NO: 50405 - DNA, 20 bp, Artificial Sequence
  chemically synthesized
tgtatccaccaggaggtacc

SEQ ID NO: 50406 - DNA, 20 bp, Artificial Sequence
  chemically synthesized
gtatccaccaggaggtaccg

SEQ ID NO: 50407 - DNA, 20 bp, Artificial Sequence
  chemically synthesized
tatccaccaggaggtaccga

SEQ ID NO: 50408 - DNA, 20 bp, Artificial Sequence
  chemically synthesized
atccaccaggaggtaccgag

SEQ ID NO: 50409 - DNA, 20 bp, Artificial Sequence
  chemically synthesized
tccaccaggaggtaccgagg

SEQ ID NO: 50410 - DNA, 20 bp, Artificial Sequence
  chemically synthesized
ccaccaggaggtaccgaggg

SEQ ID NO: 50411 - DNA, 20 bp, Artificial Sequence
  chemically synthesized
aggaggtaccgaggggggac

SEQ ID NO: 50412 - DNA, 20 bp, Artificial Sequence
  chemically synthesized
ggaggtaccgaggggggacc

SEQ ID NO: 50413 - DNA, 20 bp, Artificial Sequence
  chemically synthesized
ggtaccgaggggggaccggg

SEQ ID NO: 50414 - DNA, 20 bp, Artificial Sequence
  chemically synthesized
gtaccgaggggggaccgggc

SEQ ID NO: 50415 - DNA, 20 bp, Artificial Sequence
  chemically synthesized
gaggggggaccgggcaggac

SEQ ID NO: 50416 - DNA, 20 bp, Artificial Sequence
  chemically synthesized
aggggggaccgggcaggact

SEQ ID NO: 50417 - DNA, 20 bp, Artificial Sequence
  chemically synthesized
gaccgggcaggactgggaaa

SEQ ID NO: 50418 - DNA, 20 bp, Artificial Sequence
  chemically synthesized
accgggcaggactgggaaac

SEQ ID NO: 50419 - DNA, 20 bp, Artificial Sequence
  chemically synthesized
gaaacaggacacaaccctca

SEQ ID NO: 50420 - DNA, 20 bp, Artificial Sequence
  chemically synthesized
ggctgctgttattatgaaaa

SEQ ID NO: 50421 - DNA, 20 bp, Artificial Sequence
  chemically synthesized
gctgctgttattatgaaaat

SEQ ID NO: 50422 - DNA, 20 bp, Artificial Sequence
  chemically synthesized
tgctgttattatgaaaatag

SEQ ID NO: 50423 - DNA, 20 bp, Artificial Sequence
  chemically synthesized
ttattatgaaaataggagct

SEQ ID NO: 50424 - DNA, 20 bp, Artificial Sequence
  chemically synthesized
tgaaaataggagctcagctg

SEQ ID NO: 50425 - DNA, 20 bp, Artificial Sequence
  chemically synthesized
tctccatctgccctgcacct

SEQ ID NO: 50426 - DNA, 20 bp, Artificial Sequence
  chemically synthesized
ccatctgccctgcacctcag

SEQ ID NO: 50427 - DNA, 20 bp, Artificial Sequence
  chemically synthesized
catctgccctgcacctcagc

SEQ ID NO: 50428 - DNA, 20 bp, Artificial Sequence
  chemically synthesized
ctgccctgcacctcagcagg

SEQ ID NO: 50429 - DNA, 20 bp, Artificial Sequence
  chemically synthesized
ccacaacccccctcctgccc

SEQ ID NO: 50430 - DNA, 20 bp, Artificial Sequence
  chemically synthesized
ccccagacctgctgcctgcc

SEQ ID NO: 50431 - DNA, 20 bp, Artificial Sequence
  chemically synthesized
cccagacctgctgcctgcct

SEQ ID NO: 50432 - DNA, 20 bp, Artificial Sequence
  chemically synthesized
cctgctgcctgcctgggcca

SEQ ID NO: 50433 - DNA, 20 bp, Artificial Sequence
  chemically synthesized
ctgctgcctgcctgggccat

SEQ ID NO: 50434 - DNA, 20 bp, Artificial Sequence
  chemically synthesized
tgctgcctgcctgggccatg

SEQ ID NO: 50435 - DNA, 20 bp, Artificial Sequence
  chemically synthesized
ctgcctgcctgggccatggg

SEQ ID NO: 50436 - DNA, 20 bp, Artificial Sequence
  chemically synthesized
tgcctgggccatggggagct

SEQ ID NO: 50437 - DNA, 20 bp, Artificial Sequence
  chemically synthesized
ctgggccatggggagctcag

SEQ ID NO: 50438 - DNA, 20 bp, Artificial Sequence
  chemically synthesized
ggggagctcagaagcctctc

SEQ ID NO: 50439 - DNA, 20 bp, Artificial Sequence
  chemically synthesized
agcctctccagaacctctcg

SEQ ID NO: 50440 - DNA, 20 bp, Artificial Sequence
  chemically synthesized
tccagaacctctcgcagtga

SEQ ID NO: 50441 - DNA, 20 bp, Artificial Sequence
  chemically synthesized
ccagaacctctcgcagtgaa

SEQ ID NO: 50442 - DNA, 20 bp, Artificial Sequence
  chemically synthesized
atacttacgattcactgtcc

SEQ ID NO: 50443 - DNA, 20 bp, Artificial Sequence
  chemically synthesized
tacttacgattcactgtccc

SEQ ID NO: 50444 - DNA, 20 bp, Artificial Sequence
  chemically synthesized
tacgattcactgtcccaggt

SEQ ID NO: 50445 - DNA, 20 bp, Artificial Sequence
  chemically synthesized
gattcactgtcccaggtcag

SEQ ID NO: 50446 - DNA, 20 bp, Artificial Sequence
  chemically synthesized
tcactgtcccaggtcagtgg

SEQ ID NO: 50447 - DNA, 20 bp, Artificial Sequence
  chemically synthesized
caggtcagtggtggtgcctg

SEQ ID NO: 50448 - DNA, 20 bp, Artificial Sequence
  chemically synthesized
cagtggtggtgcctgaagct

SEQ ID NO: 50449 - DNA, 20 bp, Artificial Sequence
  chemically synthesized
agtggtggtgcctgaagctg

SEQ ID NO: 50450 - DNA, 20 bp, Artificial Sequence
  chemically synthesized
tggtggtgcctgaagctgag

SEQ ID NO: 50451 - DNA, 20 bp, Artificial Sequence
  chemically synthesized
ggtgcctgaagctgaggaga

SEQ ID NO: 50452 - DNA, 20 bp, Artificial Sequence
  chemically synthesized
gtgcctgaagctgaggagac

SEQ ID NO: 50453 - DNA, 20 bp, Artificial Sequence
  chemically synthesized
tgcctgaagctgaggagaca

SEQ ID NO: 50454 - DNA, 20 bp, Artificial Sequence
  chemically synthesized
ccctgtcctcgtccgtattt

SEQ ID NO: 50455 - DNA, 20 bp, Artificial Sequence
  chemically synthesized
tgtcctcgtccgtatttaag

SEQ ID NO: 50456 - DNA, 20 bp, Artificial Sequence
  chemically synthesized
cctcgtccgtatttaagcag

SEQ ID NO: 50457 - DNA, 20 bp, Artificial Sequence
  chemically synthesized
ccgtatttaagcagtggatc

SEQ ID NO: 50458 - DNA, 20 bp, Artificial Sequence
  chemically synthesized
gtatttaagcagtggatcca

SEQ ID NO: 50459 - DNA, 20 bp, Artificial Sequence
  chemically synthesized
tatttaagcagtggatccag

SEQ ID NO: 50460 - DNA, 20 bp, Artificial Sequence
  chemically synthesized
atttaagcagtggatccaga

SEQ ID NO: 50461 - DNA, 20 bp, Artificial Sequence
  chemically synthesized
tttaagcagtggatccagag

SEQ ID NO: 50462 - DNA, 20 bp, Artificial Sequence
  chemically synthesized
cagtggatccagaggggcaa

SEQ ID NO: 50463 - DNA, 20 bp, Artificial Sequence
  chemically synthesized
agtggatccagaggggcaac

SEQ ID NO: 50464 - DNA, 20 bp, Artificial Sequence
  chemically synthesized
gtggatccagaggggcaacg

SEQ ID NO: 50465 - DNA, 20 bp, Artificial Sequence
  chemically synthesized
tggatccagaggggcaacgg

SEQ ID NO: 50466 - DNA, 20 bp, Artificial Sequence
  chemically synthesized
gatccagaggggcaacgggg

SEQ ID NO: 50467 - DNA, 20 bp, Artificial Sequence
  chemically synthesized
atccagaggggcaacggggg

SEQ ID NO: 50468 - DNA, 20 bp, Artificial Sequence
  chemically synthesized
ggggcaacgggggaggctgc

SEQ ID NO: 50469 - DNA, 20 bp, Artificial Sequence
  chemically synthesized
gctgctggtgaatattaacc

SEQ ID NO: 50470 - DNA, 20 bp, Artificial Sequence
  chemically synthesized
ctgctggtgaatattaacca

SEQ ID NO: 50471 - DNA, 20 bp, Artificial Sequence
  chemically synthesized
aatattaaccaaggtcaccc

SEQ ID NO: 50472 - DNA, 20 bp, Artificial Sequence
  chemically synthesized
accaaggtcaccccagttat

SEQ ID NO: 50473 - DNA, 20 bp, Artificial Sequence
  chemically synthesized
caaggtcaccccagttatcg

SEQ ID NO: 50474 - DNA, 20 bp, Artificial Sequence
  chemically synthesized
aaggtcaccccagttatcgg

SEQ ID NO: 50475 - DNA, 20 bp, Artificial Sequence
  chemically synthesized
ggtcaccccagttatcggag

SEQ ID NO: 50476 - DNA, 20 bp, Artificial Sequence
  chemically synthesized
ccagttatcggaggagcaaa

SEQ ID NO: 50477 - DNA, 20 bp, Artificial Sequence
  chemically synthesized
cagttatcggaggagcaaac

SEQ ID NO: 50478 - DNA, 20 bp, Artificial Sequence
  chemically synthesized
agttatcggaggagcaaaca

SEQ ID NO: 50479 - DNA, 20 bp, Artificial Sequence
  chemically synthesized
gttatcggaggagcaaacag

SEQ ID NO: 50480 - DNA, 20 bp, Artificial Sequence
  chemically synthesized
cggaggagcaaacaggggct

SEQ ID NO: 50481 - DNA, 20 bp, Artificial Sequence
  chemically synthesized
caaacaggggctaagtccac

SEQ ID NO: 50482 - DNA, 20 bp, Artificial Sequence
  chemically synthesized
caggggctaagtccactggc

SEQ ID NO: 50483 - DNA, 20 bp, Artificial Sequence
  chemically synthesized
aggggctaagtccactggct

SEQ ID NO: 50484 - DNA, 20 bp, Artificial Sequence
  chemically synthesized
aagtccactggctgggatct

SEQ ID NO: 50485 - DNA, 20 bp, Artificial Sequence
  chemically synthesized
agtcgcccgcctacgctgcc

SEQ ID NO: 50486 - DNA, 20 bp, Artificial Sequence
  chemically synthesized
cgctgcccggacgctttgcc

SEQ ID NO: 50487 - DNA, 20 bp, Artificial Sequence
  chemically synthesized
gctgcccggacgctttgcct

SEQ ID NO: 50488 - DNA, 20 bp, Artificial Sequence
  chemically synthesized
gcccggacgctttgcctggg

SEQ ID NO: 50489 - DNA, 20 bp, Artificial Sequence
  chemically synthesized
cgctttgcctgggcagtgta

SEQ ID NO: 50490 - DNA, 20 bp, Artificial Sequence
  chemically synthesized
gcttccactgcacttaccga

SEQ ID NO: 50491 - DNA, 20 bp, Artificial Sequence
  chemically synthesized
cttccactgcacttaccgaa

SEQ ID NO: 50492 - DNA, 20 bp, Artificial Sequence
  chemically synthesized
tccactgcacttaccgaaag

SEQ ID NO: 50493 - DNA, 20 bp, Artificial Sequence
  chemically synthesized
ccgaaaggagtcattgtacc

SEQ ID NO: 50494 - DNA, 20 bp, Artificial Sequence
  chemically synthesized
aggagtcattgtacctggct

SEQ ID NO: 50495 - DNA, 20 bp, Artificial Sequence
  chemically synthesized
tgtacctggctcagaaacca

SEQ ID NO: 50496 - DNA, 20 bp, Artificial Sequence
  chemically synthesized
aaccacagcgtcctgtgtcc

SEQ ID NO: 50497 - DNA, 20 bp, Artificial Sequence
  chemically synthesized
accacagcgtcctgtgtcca

SEQ ID NO: 50498 - DNA, 20 bp, Artificial Sequence
  chemically synthesized
acagcgtcctgtgtccaagg

SEQ ID NO: 50499 - DNA, 20 bp, Artificial Sequence
  chemically synthesized
agcgtcctgtgtccaaggtg

SEQ ID NO: 50500 - DNA, 20 bp, Artificial Sequence
  chemically synthesized
gcgtcctgtgtccaaggtgg

SEQ ID NO: 50501 - DNA, 20 bp, Artificial Sequence
  chemically synthesized
cgtcctgtgtccaaggtgga

SEQ ID NO: 50502 - DNA, 20 bp, Artificial Sequence
  chemically synthesized
gtcctgtgtccaaggtggag

SEQ ID NO: 50503 - DNA, 20 bp, Artificial Sequence
  chemically synthesized
tcctgtgtccaaggtggagg

SEQ ID NO: 50504 - DNA, 20 bp, Artificial Sequence
  chemically synthesized
tgtgtccaaggtggaggggg

SEQ ID NO: 50505 - DNA, 20 bp, Artificial Sequence
  chemically synthesized
caaggtggagggggtggcgt

SEQ ID NO: 50506 - DNA, 20 bp, Artificial Sequence
  chemically synthesized
gtggagggggtggcgtgagt

SEQ ID NO: 50507 - DNA, 20 bp, Artificial Sequence
  chemically synthesized
agggggtggcgtgagtcaga

SEQ ID NO: 50508 - DNA, 20 bp, Artificial Sequence
  chemically synthesized
ggcgtgagtcagacagtctc

SEQ ID NO: 50509 - DNA, 20 bp, Artificial Sequence
  chemically synthesized
gcgtgagtcagacagtctct

SEQ ID NO: 50510 - DNA, 20 bp, Artificial Sequence
  chemically synthesized
gtgagtcagacagtctctgg

SEQ ID NO: 50511 - DNA, 20 bp, Artificial Sequence
  chemically synthesized
gagtcagacagtctctggga

SEQ ID NO: 50512 - DNA, 20 bp, Artificial Sequence
  chemically synthesized
gtctctgggagagtaccact

SEQ ID NO: 50513 - DNA, 20 bp, Artificial Sequence
  chemically synthesized
ctgggagagtaccacttagc

SEQ ID NO: 50514 - DNA, 20 bp, Artificial Sequence
  chemically synthesized
ctggccctctgctctcactg

SEQ ID NO: 50515 - DNA, 20 bp, Artificial Sequence
  chemically synthesized
tgctctcactgcagaatcct

SEQ ID NO: 50516 - DNA, 20 bp, Artificial Sequence
  chemically synthesized
tctcactgcagaatccttag

SEQ ID NO: 50517 - DNA, 20 bp, Artificial Sequence
  chemically synthesized
atccttagtggctgttccac

SEQ ID NO: 50518 - DNA, 20 bp, Artificial Sequence
  chemically synthesized
cttagtggctgttccactgg

SEQ ID NO: 50519 - DNA, 20 bp, Artificial Sequence
  chemically synthesized
gtggctgttccactggtagc

SEQ ID NO: 50520 - DNA, 20 bp, Artificial Sequence
  chemically synthesized
agcaagatctaccatttact

SEQ ID NO: 50521 - DNA, 20 bp, Artificial Sequence
  chemically synthesized
ccccaaaatgcctgatgctg

SEQ ID NO: 50522 - DNA, 20 bp, Artificial Sequence
  chemically synthesized
ctgaagacttactgccgccc

SEQ ID NO: 50523 - DNA, 20 bp, Artificial Sequence
  chemically synthesized
tgaagacttactgccgccct

SEQ ID NO: 50524 - DNA, 20 bp, Artificial Sequence
  chemically synthesized
aagacttactgccgccctgg

SEQ ID NO: 50525 - DNA, 20 bp, Artificial Sequence
  chemically synthesized
ttactgccgccctgggagat

SEQ ID NO: 50526 - DNA, 20 bp, Artificial Sequence
  chemically synthesized
actgccgccctgggagatca

SEQ ID NO: 50527 - DNA, 20 bp, Artificial Sequence
  chemically synthesized
gccgccctgggagatcagag

SEQ ID NO: 50528 - DNA, 20 bp, Artificial Sequence
  chemically synthesized
ccgccctgggagatcagagt

SEQ ID NO: 50529 - DNA, 20 bp, Artificial Sequence
  chemically synthesized
cctgggagatcagagtgggt

SEQ ID NO: 50530 - DNA, 20 bp, Artificial Sequence
  chemically synthesized
tgggagatcagagtgggtta

SEQ ID NO: 50531 - DNA, 20 bp, Artificial Sequence
  chemically synthesized
gtgggttagagcccatttga

SEQ ID NO: 50532 - DNA, 20 bp, Artificial Sequence
  chemically synthesized
ttagagcccatttgacagat

SEQ ID NO: 50533 - DNA, 20 bp, Artificial Sequence
  chemically synthesized
tagagcccatttgacagatg

SEQ ID NO: 50534 - DNA, 20 bp, Artificial Sequence
  chemically synthesized
ccatttgacagatgaggaaa

SEQ ID NO: 50535 - DNA, 20 bp, Artificial Sequence
  chemically synthesized
catttgacagatgaggaaac

SEQ ID NO: 50536 - DNA, 20 bp, Artificial Sequence
  chemically synthesized
gacagatgaggaaacaggct

SEQ ID NO: 50537 - DNA, 20 bp, Artificial Sequence
  chemically synthesized
cagatgaggaaacaggctca

SEQ ID NO: 50538 - DNA, 20 bp, Artificial Sequence
  chemically synthesized
atgaggaaacaggctcagag

SEQ ID NO: 50539 - DNA, 20 bp, Artificial Sequence
  chemically synthesized
gaggaaacaggctcagagcg

SEQ ID NO: 50540 - DNA, 20 bp, Artificial Sequence
  chemically synthesized
ggaaacaggctcagagcgga

SEQ ID NO: 50541 - DNA, 20 bp, Artificial Sequence
  chemically synthesized
gcggagagaccgctcatcca

SEQ ID NO: 50542 - DNA, 20 bp, Artificial Sequence
  chemically synthesized
accgctcatccaaagttacc

SEQ ID NO: 50543 - DNA, 20 bp, Artificial Sequence
  chemically synthesized
ctcatccaaagttacccagt

SEQ ID NO: 50544 - DNA, 20 bp, Artificial Sequence
  chemically synthesized
caaagttacccagtcagcct

SEQ ID NO: 50545 - DNA, 20 bp, Artificial Sequence
  chemically synthesized
agacacaaacaccctcttga

SEQ ID NO: 50546 - DNA, 20 bp, Artificial Sequence
  chemically synthesized
caccctcttgatggtcccga

SEQ ID NO: 50547 - DNA, 20 bp, Artificial Sequence
  chemically synthesized
tgatggtcccgatggaaaaa

SEQ ID NO: 50548 - DNA, 20 bp, Artificial Sequence
  chemically synthesized
atggtcccgatggaaaaatg

SEQ ID NO: 50549 - DNA, 20 bp, Artificial Sequence
  chemically synthesized
tggaaaaatggagcatgact

SEQ ID NO: 50550 - DNA, 20 bp, Artificial Sequence
  chemically synthesized
ggaaaaatggagcatgactg

SEQ ID NO: 50551 - DNA, 20 bp, Artificial Sequence
  chemically synthesized
aaaatggagcatgactgagg

SEQ ID NO: 50552 - DNA, 20 bp, Artificial Sequence
  chemically synthesized
actgaggcagacacaaccgt

SEQ ID NO: 50553 - DNA, 20 bp, Artificial Sequence
  chemically synthesized
ctgaggcagacacaaccgtc

SEQ ID NO: 50554 - DNA, 20 bp, Artificial Sequence
  chemically synthesized
ggcagacacaaccgtcaggc

SEQ ID NO: 50555 - DNA, 20 bp, Artificial Sequence
  chemically synthesized
acacaaccgtcaggctggca

SEQ ID NO: 50556 - DNA, 20 bp, Artificial Sequence
  chemically synthesized
cacaaccgtcaggctggcat

SEQ ID NO: 50557 - DNA, 20 bp, Artificial Sequence
  chemically synthesized
acaaccgtcaggctggcatg

SEQ ID NO: 50558 - DNA, 20 bp, Artificial Sequence
  chemically synthesized
caaccgtcaggctggcatgg

SEQ ID NO: 50559 - DNA, 20 bp, Artificial Sequence
  chemically synthesized
aaccgtcaggctggcatggg

SEQ ID NO: 50560 - DNA, 20 bp, Artificial Sequence
  chemically synthesized
aggctggcatggggggccgt

SEQ ID NO: 50561 - DNA, 20 bp, Artificial Sequence
  chemically synthesized
tggcatggggggccgtgaga

SEQ ID NO: 50562 - DNA, 20 bp, Artificial Sequence
  chemically synthesized
ggcatggggggccgtgagac

SEQ ID NO: 50563 - DNA, 20 bp, Artificial Sequence
  chemically synthesized
gcatggggggccgtgagaca

SEQ ID NO: 50564 - DNA, 20 bp, Artificial Sequence
  chemically synthesized
tggggggccgtgagacaggg

SEQ ID NO: 50565 - DNA, 20 bp, Artificial Sequence
  chemically synthesized
gggggccgtgagacagggta

SEQ ID NO: 50566 - DNA, 20 bp, Artificial Sequence
  chemically synthesized
ggggccgtgagacagggtag

SEQ ID NO: 50567 - DNA, 20 bp, Artificial Sequence
  chemically synthesized
gccgtgagacagggtagagg

SEQ ID NO: 50568 - DNA, 20 bp, Artificial Sequence
  chemically synthesized
ccgtgagacagggtagaggt

SEQ ID NO: 50569 - DNA, 20 bp, Artificial Sequence
  chemically synthesized
cgtgagacagggtagaggtg

SEQ ID NO: 50570 - DNA, 20 bp, Artificial Sequence
  chemically synthesized
gagacagggtagaggtgggg

SEQ ID NO: 50571 - DNA, 20 bp, Artificial Sequence
  chemically synthesized
ggtggggaagcacatctgta

SEQ ID NO: 50572 - DNA, 20 bp, Artificial Sequence
  chemically synthesized
ggggaagcacatctgtaaag

SEQ ID NO: 50573 - DNA, 20 bp, Artificial Sequence
  chemically synthesized
ggaagcacatctgtaaagaa

SEQ ID NO: 50574 - DNA, 20 bp, Artificial Sequence
  chemically synthesized
aaagaagagctgtgctgcct

SEQ ID NO: 50575 - DNA, 20 bp, Artificial Sequence
  chemically synthesized
aagaagagctgtgctgcctc

SEQ ID NO: 50576 - DNA, 20 bp, Artificial Sequence
  chemically synthesized
aagagctgtgctgcctcagg

SEQ ID NO: 50577 - DNA, 20 bp, Artificial Sequence
  chemically synthesized
agagctgtgctgcctcaggc

SEQ ID NO: 50578 - DNA, 20 bp, Artificial Sequence
  chemically synthesized
gccgcttcacctctctgaac

SEQ ID NO: 50579 - DNA, 20 bp, Artificial Sequence
  chemically synthesized
ccgcttcacctctctgaacc

SEQ ID NO: 50580 - DNA, 20 bp, Artificial Sequence
  chemically synthesized
actgtttcacctgcatccca

SEQ ID NO: 50581 - DNA, 20 bp, Artificial Sequence
  chemically synthesized
tgtttcacctgcatcccaaa

SEQ ID NO: 50582 - DNA, 20 bp, Artificial Sequence
  chemically synthesized
tcacctgcatcccaaagagt

SEQ ID NO: 50583 - DNA, 20 bp, Artificial Sequence
  chemically synthesized
cctgcatcccaaagagttgg

SEQ ID NO: 50584 - DNA, 20 bp, Artificial Sequence
  chemically synthesized
gagttggaagtttcattccc

SEQ ID NO: 50585 - DNA, 20 bp, Artificial Sequence
  chemically synthesized
cattcccaagcatgcttgtg

SEQ ID NO: 50586 - DNA, 20 bp, Artificial Sequence
  chemically synthesized
agcatgcttgtgaagtgcct

SEQ ID NO: 50587 - DNA, 20 bp, Artificial Sequence
  chemically synthesized
gcatgcttgtgaagtgcctc

SEQ ID NO: 50588 - DNA, 20 bp, Artificial Sequence
  chemically synthesized
cttgtgaagtgcctcgggtg

SEQ ID NO: 50589 - DNA, 20 bp, Artificial Sequence
  chemically synthesized
agtgcctcgggtgaagtgcc

SEQ ID NO: 50590 - DNA, 20 bp, Artificial Sequence
  chemically synthesized
cgggtgaagtgcctggcaca

SEQ ID NO: 50591 - DNA, 20 bp, Artificial Sequence
  chemically synthesized
gtgaagtgcctggcacacag

SEQ ID NO: 50592 - DNA, 20 bp, Artificial Sequence
  chemically synthesized
tgaagtgcctggcacacagt

SEQ ID NO: 50593 - DNA, 20 bp, Artificial Sequence
  chemically synthesized
cacacagtaggctctttatg

SEQ ID NO: 50594 - DNA, 20 bp, Artificial Sequence
  chemically synthesized
acacagtaggctctttatgt

SEQ ID NO: 50595 - DNA, 20 bp, Artificial Sequence
  chemically synthesized
gctctttatgtgggtctgca

SEQ ID NO: 50596 - DNA, 20 bp, Artificial Sequence
  chemically synthesized
ggtctgcacagccctctgct

SEQ ID NO: 50597 - DNA, 20 bp, Artificial Sequence
  chemically synthesized
cctctgcttagtctgccccc

SEQ ID NO: 50598 - DNA, 20 bp, Artificial Sequence
  chemically synthesized
ctctgcttagtctgcccccc

SEQ ID NO: 50599 - DNA, 20 bp, Artificial Sequence
  chemically synthesized
agtctgccccccaggctgct

SEQ ID NO: 50600 - DNA, 20 bp, Artificial Sequence
  chemically synthesized
tctgccccccaggctgctca

SEQ ID NO: 50601 - DNA, 20 bp, Artificial Sequence
  chemically synthesized
gccccccaggctgctcagag

SEQ ID NO: 50602 - DNA, 20 bp, Artificial Sequence
  chemically synthesized
ccccccaggctgctcagagc

SEQ ID NO: 50603 - DNA, 20 bp, Artificial Sequence
  chemically synthesized
ccccaggctgctcagagcag

SEQ ID NO: 50604 - DNA, 20 bp, Artificial Sequence
  chemically synthesized
cccaggctgctcagagcagg

SEQ ID NO: 50605 - DNA, 20 bp, Artificial Sequence
  chemically synthesized
caggctgctcagagcaggag

SEQ ID NO: 50606 - DNA, 20 bp, Artificial Sequence
  chemically synthesized
aggctgctcagagcaggagg

SEQ ID NO: 50607 - DNA, 20 bp, Artificial Sequence
  chemically synthesized
ggaggaggttcaattttgac

SEQ ID NO: 50608 - DNA, 20 bp, Artificial Sequence
  chemically synthesized
ggttcaattttgaccagcct

SEQ ID NO: 50609 - DNA, 20 bp, Artificial Sequence
  chemically synthesized
gttcaattttgaccagcctc

SEQ ID NO: 50610 - DNA, 20 bp, Artificial Sequence
  chemically synthesized
cctgtttctgtttttgctcc

SEQ ID NO: 50611 - DNA, 20 bp, Artificial Sequence
  chemically synthesized
tgtttttgctcctggaaaac

SEQ ID NO: 50612 - DNA, 20 bp, Artificial Sequence
  chemically synthesized
aaaccagtgtgatccgtata

SEQ ID NO: 50613 - DNA, 20 bp, Artificial Sequence
  chemically synthesized
agtgtgatccgtatacagct

SEQ ID NO: 50614 - DNA, 20 bp, Artificial Sequence
  chemically synthesized
tgtgatccgtatacagcttg

SEQ ID NO: 50615 - DNA, 20 bp, Artificial Sequence
  chemically synthesized
tatacagcttggagtttctt

SEQ ID NO: 50616 - DNA, 20 bp, Artificial Sequence
  chemically synthesized
ttggagtttctttggataca

SEQ ID NO: 50617 - DNA, 20 bp, Artificial Sequence
  chemically synthesized
tggatacatggcccccactc

SEQ ID NO: 50618 - DNA, 20 bp, Artificial Sequence
  chemically synthesized
ggatacatggcccccactct

SEQ ID NO: 50619 - DNA, 20 bp, Artificial Sequence
  chemically synthesized
gatacatggcccccactctg

SEQ ID NO: 50620 - DNA, 20 bp, Artificial Sequence
  chemically synthesized
ggcccccactctggggttgt

SEQ ID NO: 50621 - DNA, 20 bp, Artificial Sequence
  chemically synthesized
cccccactctggggttgttg

SEQ ID NO: 50622 - DNA, 20 bp, Artificial Sequence
  chemically synthesized
ccccactctggggttgttgg

SEQ ID NO: 50623 - DNA, 20 bp, Artificial Sequence
  chemically synthesized
ctggggttgttggaggcctt

SEQ ID NO: 50624 - DNA, 20 bp, Artificial Sequence
  chemically synthesized
ggggttgttggaggcctttg

SEQ ID NO: 50625 - DNA, 20 bp, Artificial Sequence
  chemically synthesized
tggaggcctttggagactgc

SEQ ID NO: 50626 - DNA, 20 bp, Artificial Sequence
  chemically synthesized
ggaggcctttggagactgct

SEQ ID NO: 50627 - DNA, 20 bp, Artificial Sequence
  chemically synthesized
gaggcctttggagactgctg

SEQ ID NO: 50628 - DNA, 20 bp, Artificial Sequence
  chemically synthesized
aggcctttggagactgctgg

SEQ ID NO: 50629 - DNA, 20 bp, Artificial Sequence
  chemically synthesized
cctttggagactgctggggg

SEQ ID NO: 50630 - DNA, 20 bp, Artificial Sequence
  chemically synthesized
tttggagactgctgggggtg

SEQ ID NO: 50631 - DNA, 20 bp, Artificial Sequence
  chemically synthesized
ttggagactgctgggggtgg

SEQ ID NO: 50632 - DNA, 20 bp, Artificial Sequence
  chemically synthesized
tggagactgctgggggtgga

SEQ ID NO: 50633 - DNA, 20 bp, Artificial Sequence
  chemically synthesized
ggagactgctgggggtggag

SEQ ID NO: 50634 - DNA, 20 bp, Artificial Sequence
  chemically synthesized
agactgctgggggtggaggg

SEQ ID NO: 50635 - DNA, 20 bp, Artificial Sequence
  chemically synthesized
gactgctgggggtggagggg

SEQ ID NO: 50636 - DNA, 20 bp, Artificial Sequence
  chemically synthesized
actgctgggggtggagggga

SEQ ID NO: 50637 - DNA, 20 bp, Artificial Sequence
  chemically synthesized
ctgctgggggtggaggggag

SEQ ID NO: 50638 - DNA, 20 bp, Artificial Sequence
  chemically synthesized
gctgggggtggaggggaggg

SEQ ID NO: 50639 - DNA, 20 bp, Artificial Sequence
  chemically synthesized
ctgggggtggaggggagggg

SEQ ID NO: 50640 - DNA, 20 bp, Artificial Sequence
  chemically synthesized
ggtggaggggaggggaggta

SEQ ID NO: 50641 - DNA, 20 bp, Artificial Sequence
  chemically synthesized
gtggaggggaggggaggtac

SEQ ID NO: 50642 - DNA, 20 bp, Artificial Sequence
  chemically synthesized
tggaggggaggggaggtaca

SEQ ID NO: 50643 - DNA, 20 bp, Artificial Sequence
  chemically synthesized
gggaggggaggtacagggtt

SEQ ID NO: 50644 - DNA, 20 bp, Artificial Sequence
  chemically synthesized
ggaggggaggtacagggttg

SEQ ID NO: 50645 - DNA, 20 bp, Artificial Sequence
  chemically synthesized
gggaggtacagggttgaggc

SEQ ID NO: 50646 - DNA, 20 bp, Artificial Sequence
  chemically synthesized
aggtacagggttgaggctag

SEQ ID NO: 50647 - DNA, 20 bp, Artificial Sequence
  chemically synthesized
ggtacagggttgaggctagt

SEQ ID NO: 50648 - DNA, 20 bp, Artificial Sequence
  chemically synthesized
gtacagggttgaggctagtg

SEQ ID NO: 50649 - DNA, 20 bp, Artificial Sequence
  chemically synthesized
cttgattgcaatccctttaa

SEQ ID NO: 50650 - DNA, 20 bp, Artificial Sequence
  chemically synthesized
atccctttaaaagcctaaat

SEQ ID NO: 50651 - DNA, 20 bp, Artificial Sequence
  chemically synthesized
gtgcaacccgcaaacctgct

SEQ ID NO: 50652 - DNA, 20 bp, Artificial Sequence
  chemically synthesized
tgcaacccgcaaacctgctt

SEQ ID NO: 50653 - DNA, 20 bp, Artificial Sequence
  chemically synthesized
caacccgcaaacctgcttgg

SEQ ID NO: 50654 - DNA, 20 bp, Artificial Sequence
  chemically synthesized
ccgcaaacctgcttgggagc

SEQ ID NO: 50655 - DNA, 20 bp, Artificial Sequence
  chemically synthesized
gggagctggcgtacgtgccg

SEQ ID NO: 50656 - DNA, 20 bp, Artificial Sequence
  chemically synthesized
gtacgtgccgtagatacttg

SEQ ID NO: 50657 - DNA, 20 bp, Artificial Sequence
  chemically synthesized
acgtgccgtagatacttgca

SEQ ID NO: 50658 - DNA, 20 bp, Artificial Sequence
  chemically synthesized
gtagatacttgcagagtgaa

SEQ ID NO: 50659 - DNA, 20 bp, Artificial Sequence
  chemically synthesized
tacttgcagagtgaatggat

SEQ ID NO: 50660 - DNA, 20 bp, Artificial Sequence
  chemically synthesized
ttgccccttctgtcattcac

SEQ ID NO: 50661 - DNA, 20 bp, Artificial Sequence
  chemically synthesized
tcccatttatgcctccacct

SEQ ID NO: 50662 - DNA, 20 bp, Artificial Sequence
  chemically synthesized
cccatttatgcctccacctt

SEQ ID NO: 50663 - DNA, 20 bp, Artificial Sequence
  chemically synthesized
ccatttatgcctccaccttg

SEQ ID NO: 50664 - DNA, 20 bp, Artificial Sequence
  chemically synthesized
cctccaccttggggctctac

SEQ ID NO: 50665 - DNA, 20 bp, Artificial Sequence
  chemically synthesized
ctccaccttggggctctacc

SEQ ID NO: 50666 - DNA, 20 bp, Artificial Sequence
  chemically synthesized
accttggggctctaccaggc

SEQ ID NO: 50667 - DNA, 20 bp, Artificial Sequence
  chemically synthesized
tctaccaggcgagtgaccca

SEQ ID NO: 50668 - DNA, 20 bp, Artificial Sequence
  chemically synthesized
ctaccaggcgagtgacccac

SEQ ID NO: 50669 - DNA, 20 bp, Artificial Sequence
  chemically synthesized
gagtgacccacaggatcctc

SEQ ID NO: 50670 - DNA, 20 bp, Artificial Sequence
  chemically synthesized
gatcctccagcacacacatt

SEQ ID NO: 50671 - DNA, 20 bp, Artificial Sequence
  chemically synthesized
tccagcacacacattcagac

SEQ ID NO: 50672 - DNA, 20 bp, Artificial Sequence
  chemically synthesized
ccagcacacacattcagacc

SEQ ID NO: 50673 - DNA, 20 bp, Artificial Sequence
  chemically synthesized
cagcacacacattcagacca

SEQ ID NO: 50674 - DNA, 20 bp, Artificial Sequence
  chemically synthesized
agaccagggaacccacttac

SEQ ID NO: 50675 - DNA, 20 bp, Artificial Sequence
  chemically synthesized
ggaacccacttactggctgt

SEQ ID NO: 50676 - DNA, 20 bp, Artificial Sequence
  chemically synthesized
gaacccacttactggctgtg

SEQ ID NO: 50677 - DNA, 20 bp, Artificial Sequence
  chemically synthesized
acttactggctgtgaggcct

SEQ ID NO: 50678 - DNA, 20 bp, Artificial Sequence
  chemically synthesized
cttactggctgtgaggcctc

SEQ ID NO: 50679 - DNA, 20 bp, Artificial Sequence
  chemically synthesized
ctggctgtgaggcctcaggt

SEQ ID NO: 50680 - DNA, 20 bp, Artificial Sequence
  chemically synthesized
gtgagttgtttaaccgctcc

SEQ ID NO: 50681 - DNA, 20 bp, Artificial Sequence
  chemically synthesized
caatttccctatctgtaaaa

SEQ ID NO: 50682 - DNA, 20 bp, Artificial Sequence
  chemically synthesized
aatttccctatctgtaaaat

SEQ ID NO: 50683 - DNA, 20 bp, Artificial Sequence
  chemically synthesized
atttccctatctgtaaaatg

SEQ ID NO: 50684 - DNA, 20 bp, Artificial Sequence
  chemically synthesized
ccctatctgtaaaatgggga

SEQ ID NO: 50685 - DNA, 20 bp, Artificial Sequence
  chemically synthesized
ctgtaaaatggggatggtga

SEQ ID NO: 50686 - DNA, 20 bp, Artificial Sequence
  chemically synthesized
gtgacggtatgtaccttgtt

SEQ ID NO: 50687 - DNA, 20 bp, Artificial Sequence
  chemically synthesized
gtaccttgttgagctgctgt

SEQ ID NO: 50688 - DNA, 20 bp, Artificial Sequence
  chemically synthesized
taccttgttgagctgctgtg

SEQ ID NO: 50689 - DNA, 20 bp, Artificial Sequence
  chemically synthesized
ctgtgaggattaaaatgcaa

SEQ ID NO: 50690 - DNA, 20 bp, Artificial Sequence
  chemically synthesized
ggattaaaatgcaacagttc

SEQ ID NO: 50691 - DNA, 20 bp, Artificial Sequence
  chemically synthesized
gattaaaatgcaacagttca

SEQ ID NO: 50692 - DNA, 20 bp, Artificial Sequence
  chemically synthesized
aaaatgcaacagttcaagga

SEQ ID NO: 50693 - DNA, 20 bp, Artificial Sequence
  chemically synthesized
gcaacagttcaaggaaagct

SEQ ID NO: 50694 - DNA, 20 bp, Artificial Sequence
  chemically synthesized
aacagttcaaggaaagctca

SEQ ID NO: 50695 - DNA, 20 bp, Artificial Sequence
  chemically synthesized
gttcaaggaaagctcagaga

SEQ ID NO: 50696 - DNA, 20 bp, Artificial Sequence
  chemically synthesized
ttcaaggaaagctcagagac

SEQ ID NO: 50697 - DNA, 20 bp, Artificial Sequence
  chemically synthesized
gaaagctcagagacgggtac

SEQ ID NO: 50698 - DNA, 20 bp, Artificial Sequence
  chemically synthesized
aaagctcagagacgggtact

SEQ ID NO: 50699 - DNA, 20 bp, Artificial Sequence
  chemically synthesized
agacgggtactgggtgtgcc

SEQ ID NO: 50700 - DNA, 20 bp, Artificial Sequence
  chemically synthesized
gggtactgggtgtgcccaga

SEQ ID NO: 50701 - DNA, 20 bp, Artificial Sequence
  chemically synthesized
ctgccctccctcccccgtgt

SEQ ID NO: 50702 - DNA, 20 bp, Artificial Sequence
  chemically synthesized
tgccctccctcccccgtgtc

SEQ ID NO: 50703 - DNA, 20 bp, Artificial Sequence
  chemically synthesized
gccctccctcccccgtgtca

SEQ ID NO: 50704 - DNA, 20 bp, Artificial Sequence
  chemically synthesized
ccctccctcccccgtgtcag

SEQ ID NO: 50705 - DNA, 20 bp, Artificial Sequence
  chemically synthesized
ccctcccccgtgtcaggggc

SEQ ID NO: 50706 - DNA, 20 bp, Artificial Sequence
  chemically synthesized
gtgtcaggggctggtgtcac

SEQ ID NO: 50707 - DNA, 20 bp, Artificial Sequence
  chemically synthesized
tgtcaggggctggtgtcact

SEQ ID NO: 50708 - DNA, 20 bp, Artificial Sequence
  chemically synthesized
gtcaggggctggtgtcactg

SEQ ID NO: 50709 - DNA, 20 bp, Artificial Sequence
  chemically synthesized
aggggctggtgtcactgggg

SEQ ID NO: 50710 - DNA, 20 bp, Artificial Sequence
  chemically synthesized
ggggctggtgtcactggggt

SEQ ID NO: 50711 - DNA, 20 bp, Artificial Sequence
  chemically synthesized
gggctggtgtcactggggtg

SEQ ID NO: 50712 - DNA, 20 bp, Artificial Sequence
  chemically synthesized
ctggtgtcactggggtgggg

SEQ ID NO: 50713 - DNA, 20 bp, Artificial Sequence
  chemically synthesized
tggtgtcactggggtggggt

SEQ ID NO: 50714 - DNA, 20 bp, Artificial Sequence
  chemically synthesized
ggtggggtgggccacacttg

SEQ ID NO: 50715 - DNA, 20 bp, Artificial Sequence
  chemically synthesized
tggggtgggccacacttgaa

SEQ ID NO: 50716 - DNA, 20 bp, Artificial Sequence
  chemically synthesized
acacttgaagagctttcctc

SEQ ID NO: 50717 - DNA, 20 bp, Artificial Sequence
  chemically synthesized
cacttgaagagctttcctcc

SEQ ID NO: 50718 - DNA, 20 bp, Artificial Sequence
  chemically synthesized
ttgaagagctttcctccagg

SEQ ID NO: 50719 - DNA, 20 bp, Artificial Sequence
  chemically synthesized
cctccaggcagtctctcatt

SEQ ID NO: 50720 - DNA, 20 bp, Artificial Sequence
  chemically synthesized
tctcattcagttaccctgtg

SEQ ID NO: 50721 - DNA, 20 bp, Artificial Sequence
  chemically synthesized
ctcattcagttaccctgtga

SEQ ID NO: 50722 - DNA, 20 bp, Artificial Sequence
  chemically synthesized
tcattcagttaccctgtgaa

SEQ ID NO: 50723 - DNA, 20 bp, Artificial Sequence
  chemically synthesized
attcagttaccctgtgaagg

SEQ ID NO: 50724 - DNA, 20 bp, Artificial Sequence
  chemically synthesized
cagttaccctgtgaagggag

SEQ ID NO: 50725 - DNA, 20 bp, Artificial Sequence
  chemically synthesized
agttaccctgtgaagggagt

SEQ ID NO: 50726 - DNA, 20 bp, Artificial Sequence
  chemically synthesized
agtaggtaccaccctccttt

SEQ ID NO: 50727 - DNA, 20 bp, Artificial Sequence
  chemically synthesized
gtaggtaccaccctcctttc

SEQ ID NO: 50728 - DNA, 20 bp, Artificial Sequence
  chemically synthesized
ggtaccaccctcctttcagg

SEQ ID NO: 50729 - DNA, 20 bp, Artificial Sequence
  chemically synthesized
accaccctcctttcaggcag

SEQ ID NO: 50730 - DNA, 20 bp, Artificial Sequence
  chemically synthesized
ccaccctcctttcaggcagc

SEQ ID NO: 50731 - DNA, 20 bp, Artificial Sequence
  chemically synthesized
ctttcaggcagcgggaaact

SEQ ID NO: 50732 - DNA, 20 bp, Artificial Sequence
  chemically synthesized
aggcagcgggaaactgagct

SEQ ID NO: 50733 - DNA, 20 bp, Artificial Sequence
  chemically synthesized
actcccctccccttctctct

SEQ ID NO: 50734 - DNA, 20 bp, Artificial Sequence
  chemically synthesized
tctctgagctcccttccctg

SEQ ID NO: 50735 - DNA, 20 bp, Artificial Sequence
  chemically synthesized
ttccctgcagctccatcccc

SEQ ID NO: 50736 - DNA, 20 bp, Artificial Sequence
  chemically synthesized
gcagctccatcccctggctt

SEQ ID NO: 50737 - DNA, 20 bp, Artificial Sequence
  chemically synthesized
cagctccatcccctggcttc

SEQ ID NO: 50738 - DNA, 20 bp, Artificial Sequence
  chemically synthesized
agctccatcccctggcttca

SEQ ID NO: 50739 - DNA, 20 bp, Artificial Sequence
  chemically synthesized
agggcccctgtccttcccct

SEQ ID NO: 50740 - DNA, 20 bp, Artificial Sequence
  chemically synthesized
cccctgtccttcccctgagc

SEQ ID NO: 50741 - DNA, 20 bp, Artificial Sequence
  chemically synthesized
cttcccctgagctggctgaa

SEQ ID NO: 50742 - DNA, 20 bp, Artificial Sequence
  chemically synthesized
cgctgctctacatccactca

SEQ ID NO: 50743 - DNA, 20 bp, Artificial Sequence
  chemically synthesized
tctacatccactcacagctc

SEQ ID NO: 50744 - DNA, 20 bp, Artificial Sequence
  chemically synthesized
tccactcacagctccagcac

SEQ ID NO: 50745 - DNA, 20 bp, Artificial Sequence
  chemically synthesized
ccactcacagctccagcact

SEQ ID NO: 50746 - DNA, 20 bp, Artificial Sequence
  chemically synthesized
acagctccagcactgggctg

SEQ ID NO: 50747 - DNA, 20 bp, Artificial Sequence
  chemically synthesized
tccagcactgggctgtggtt

SEQ ID NO: 50748 - DNA, 20 bp, Artificial Sequence
  chemically synthesized
ccagcactgggctgtggttg

SEQ ID NO: 50749 - DNA, 20 bp, Artificial Sequence
  chemically synthesized
tggttgaggtcgcctgccct

SEQ ID NO: 50750 - DNA, 20 bp, Artificial Sequence
  chemically synthesized
ttgaggtcgcctgccctcgg

SEQ ID NO: 50751 - DNA, 20 bp, Artificial Sequence
  chemically synthesized
cgcctgccctcggtagctcc

SEQ ID NO: 50752 - DNA, 20 bp, Artificial Sequence
  chemically synthesized
gcctgccctcggtagctcct

SEQ ID NO: 50753 - DNA, 20 bp, Artificial Sequence
  chemically synthesized
tgggcatttcttcccctctc

SEQ ID NO: 50754 - DNA, 20 bp, Artificial Sequence
  chemically synthesized
gggcatttcttcccctctct

SEQ ID NO: 50755 - DNA, 20 bp, Artificial Sequence
  chemically synthesized
tgcacaatgacccccactct

SEQ ID NO: 50756 - DNA, 20 bp, Artificial Sequence
  chemically synthesized
cctgctgtccctcccacctg

SEQ ID NO: 50757 - DNA, 20 bp, Artificial Sequence
  chemically synthesized
tccctcccacctgtggaact

SEQ ID NO: 50758 - DNA, 20 bp, Artificial Sequence
  chemically synthesized
tcccacctgtggaactgagt

SEQ ID NO: 50759 - DNA, 20 bp, Artificial Sequence
  chemically synthesized
cacctgtggaactgagtgag

SEQ ID NO: 50760 - DNA, 20 bp, Artificial Sequence
  chemically synthesized
ctgtggaactgagtgagcag

SEQ ID NO: 50761 - DNA, 20 bp, Artificial Sequence
  chemically synthesized
tggaactgagtgagcagcag

SEQ ID NO: 50762 - DNA, 20 bp, Artificial Sequence
  chemically synthesized
ccacctttcctgctctcctc

SEQ ID NO: 50763 - DNA, 20 bp, Artificial Sequence
  chemically synthesized
gctctcctcaagctctcctc

SEQ ID NO: 50764 - DNA, 20 bp, Artificial Sequence
  chemically synthesized
tcctcaagctctgtctcttc

SEQ ID NO: 50765 - DNA, 20 bp, Artificial Sequence
  chemically synthesized
tcaagctctgtctcttctgg

SEQ ID NO: 50766 - DNA, 20 bp, Artificial Sequence
  chemically synthesized
caagctctgtctcttctggc

SEQ ID NO: 50767 - DNA, 20 bp, Artificial Sequence
  chemically synthesized
tctgtctcttctggcaggca

SEQ ID NO: 50768 - DNA, 20 bp, Artificial Sequence
  chemically synthesized
ctgtctcttctggcaggcac

SEQ ID NO: 50769 - DNA, 20 bp, Artificial Sequence
  chemically synthesized
gtctcttctggcaggcacag

SEQ ID NO: 50770 - DNA, 20 bp, Artificial Sequence
  chemically synthesized
ctcttctggcaggcacagga

SEQ ID NO: 50771 - DNA, 20 bp, Artificial Sequence
  chemically synthesized
ttctggcaggcacaggagag

SEQ ID NO: 50772 - DNA, 20 bp, Artificial Sequence
  chemically synthesized
aggcacaggagagtggcctg

SEQ ID NO: 50773 - DNA, 20 bp, Artificial Sequence
  chemically synthesized
ggcacaggagagtggcctga

SEQ ID NO: 50774 - DNA, 20 bp, Artificial Sequence
  chemically synthesized
caggagagtggcctgaaggc

SEQ ID NO: 50775 - DNA, 20 bp, Artificial Sequence
  chemically synthesized
gagagtggcctgaaggctgg

SEQ ID NO: 50776 - DNA, 20 bp, Artificial Sequence
  chemically synthesized
agagtggcctgaaggctggc

SEQ ID NO: 50777 - DNA, 20 bp, Artificial Sequence
  chemically synthesized
agtggcctgaaggctggcag

SEQ ID NO: 50778 - DNA, 20 bp, Artificial Sequence
  chemically synthesized
gtggcctgaaggctggcagg

SEQ ID NO: 50779 - DNA, 20 bp, Artificial Sequence
  chemically synthesized
aggttgccgcccctccaacc

SEQ ID NO: 50780 - DNA, 20 bp, Artificial Sequence
  chemically synthesized
cccctccaacctggaattcc

SEQ ID NO: 50781 - DNA, 20 bp, Artificial Sequence
  chemically synthesized
ctccaacctggaattcctgg

SEQ ID NO: 50782 - DNA, 20 bp, Artificial Sequence
  chemically synthesized
caacctggaattcctggcag

SEQ ID NO: 50783 - DNA, 20 bp, Artificial Sequence
  chemically synthesized
cctggaattcctggcagcag

SEQ ID NO: 50784 - DNA, 20 bp, Artificial Sequence
  chemically synthesized
ggaattcctggcagcagcag

SEQ ID NO: 50785 - DNA, 20 bp, Artificial Sequence
  chemically synthesized
ttcctggcagcagcagcggc

SEQ ID NO: 50786 - DNA, 20 bp, Artificial Sequence
  chemically synthesized
tcctggcagcagcagcggct

SEQ ID NO: 50787 - DNA, 20 bp, Artificial Sequence
  chemically synthesized
agcagcggctaggccttcct

SEQ ID NO: 50788 - DNA, 20 bp, Artificial Sequence
  chemically synthesized
cagcggctaggccttcctcg

SEQ ID NO: 50789 - DNA, 20 bp, Artificial Sequence
  chemically synthesized
agcggctaggccttcctcgg

SEQ ID NO: 50790 - DNA, 20 bp, Artificial Sequence
  chemically synthesized
cccgaccccctcctccttct

SEQ ID NO: 50791 - DNA, 20 bp, Artificial Sequence
  chemically synthesized
ccccctcctccttcttggtt

SEQ ID NO: 50792 - DNA, 20 bp, Artificial Sequence
  chemically synthesized
tcctccttcttggttcagct

SEQ ID NO: 50793 - DNA, 20 bp, Artificial Sequence
  chemically synthesized
cctccttcttggttcagctc

SEQ ID NO: 50794 - DNA, 20 bp, Artificial Sequence
  chemically synthesized
ttggttcagctcaggactct

SEQ ID NO: 50795 - DNA, 20 bp, Artificial Sequence
  chemically synthesized
tggttcagctcaggactctg

SEQ ID NO: 50796 - DNA, 20 bp, Artificial Sequence
  chemically synthesized
ggttcagctcaggactctga

SEQ ID NO: 50797 - DNA, 20 bp, Artificial Sequence
  chemically synthesized
ggactctgagggttgctgcg

SEQ ID NO: 50798 - DNA, 20 bp, Artificial Sequence
  chemically synthesized
actctgagggttgctgcgtg

SEQ ID NO: 50799 - DNA, 20 bp, Artificial Sequence
  chemically synthesized
ctctgagggttgctgcgtgg

SEQ ID NO: 50800 - DNA, 20 bp, Artificial Sequence
  chemically synthesized
tgagggttgctgcgtggagg

SEQ ID NO: 50801 - DNA, 20 bp, Artificial Sequence
  chemically synthesized
cgtggaggcagtgcatgccc

SEQ ID NO: 50802 - DNA, 20 bp, Artificial Sequence
  chemically synthesized
gtggaggcagtgcatgccct

SEQ ID NO: 50803 - DNA, 20 bp, Artificial Sequence
  chemically synthesized
ggcagtgcatgccctgggca

SEQ ID NO: 50804 - DNA, 20 bp, Artificial Sequence
  chemically synthesized
catgccctgggcacagtgcc

SEQ ID NO: 50805 - DNA, 20 bp, Artificial Sequence
  chemically synthesized
gtgcccagttcctgcccacc

SEQ ID NO: 50806 - DNA, 20 bp, Artificial Sequence
  chemically synthesized
tgcccagttcctgcccaccc

SEQ ID NO: 50807 - DNA, 20 bp, Artificial Sequence
  chemically synthesized
ccagttcctgcccacccagg

SEQ ID NO: 50808 - DNA, 20 bp, Artificial Sequence
  chemically synthesized
gttcctgcccacccaggaag

SEQ ID NO: 50809 - DNA, 20 bp, Artificial Sequence
  chemically synthesized
cccacccaggaagtagactt

SEQ ID NO: 50810 - DNA, 20 bp, Artificial Sequence
  chemically synthesized
ccacccaggaagtagacttc

SEQ ID NO: 50811 - DNA, 20 bp, Artificial Sequence
  chemically synthesized
cccaggaagtagacttcggg

SEQ ID NO: 50812 - DNA, 20 bp, Artificial Sequence
  chemically synthesized
caggaagtagacttcgggtg

SEQ ID NO: 50813 - DNA, 20 bp, Artificial Sequence
  chemically synthesized
aggaagtagacttcgggtgg

SEQ ID NO: 50814 - DNA, 20 bp, Artificial Sequence
  chemically synthesized
aagtagacttcgggtggagg

SEQ ID NO: 50815 - DNA, 20 bp, Artificial Sequence
  chemically synthesized
tagacttcgggtggaggcag

SEQ ID NO: 50816 - DNA, 20 bp, Artificial Sequence
  chemically synthesized
agacttcgggtggaggcagt

SEQ ID NO: 50817 - DNA, 20 bp, Artificial Sequence
  chemically synthesized
ttcgggtggaggcagtaggc

SEQ ID NO: 50818 - DNA, 20 bp, Artificial Sequence
  chemically synthesized
tcgggtggaggcagtaggct

SEQ ID NO: 50819 - DNA, 20 bp, Artificial Sequence
  chemically synthesized
cgggtggaggcagtaggctg

SEQ ID NO: 50820 - DNA, 20 bp, Artificial Sequence
  chemically synthesized
ggtggaggcagtaggctggg

SEQ ID NO: 50821 - DNA, 20 bp, Artificial Sequence
  chemically synthesized
gtggaggcagtaggctgggg

SEQ ID NO: 50822 - DNA, 20 bp, Artificial Sequence
  chemically synthesized
tggaggcagtaggctgggga

SEQ ID NO: 50823 - DNA, 20 bp, Artificial Sequence
  chemically synthesized
ggaggcagtaggctggggag

SEQ ID NO: 50824 - DNA, 20 bp, Artificial Sequence
  chemically synthesized
ggcagtaggctggggagggg

SEQ ID NO: 50825 - DNA, 20 bp, Artificial Sequence
  chemically synthesized
gcagtaggctggggaggggc

SEQ ID NO: 50826 - DNA, 20 bp, Artificial Sequence
  chemically synthesized
cagtaggctggggaggggcg

SEQ ID NO: 50827 - DNA, 20 bp, Artificial Sequence
  chemically synthesized
gtaggctggggaggggcggg

SEQ ID NO: 50828 - DNA, 20 bp, Artificial Sequence
  chemically synthesized
ctggggaggggcggggagct

SEQ ID NO: 50829 - DNA, 20 bp, Artificial Sequence
  chemically synthesized
ggaggggcggggagcttgga

SEQ ID NO: 50830 - DNA, 20 bp, Artificial Sequence
  chemically synthesized
gaggggcggggagcttggac

SEQ ID NO: 50831 - DNA, 20 bp, Artificial Sequence
  chemically synthesized
gggcggggagcttggacagg

SEQ ID NO: 50832 - DNA, 20 bp, Artificial Sequence
  chemically synthesized
ggcggggagcttggacagga

SEQ ID NO: 50833 - DNA, 20 bp, Artificial Sequence
  chemically synthesized
cggggagcttggacaggaag

SEQ ID NO: 50834 - DNA, 20 bp, Artificial Sequence
  chemically synthesized
aaggagccttgctcattgcc

SEQ ID NO: 50835 - DNA, 20 bp, Artificial Sequence
  chemically synthesized
gagccttgctcattgcccgg

SEQ ID NO: 50836 - DNA, 20 bp, Artificial Sequence
  chemically synthesized
gctcattgcccggcagacac

SEQ ID NO: 50837 - DNA, 20 bp, Artificial Sequence
  chemically synthesized
ttgcccggcagacacaagac

SEQ ID NO: 50838 - DNA, 20 bp, Artificial Sequence
  chemically synthesized
tgcccggcagacacaagact

SEQ ID NO: 50839 - DNA, 20 bp, Artificial Sequence
  chemically synthesized
agactgggccctcataaact

SEQ ID NO: 50840 - DNA, 20 bp, Artificial Sequence
  chemically synthesized
tgggccctcataaactcaga

SEQ ID NO: 50841 - DNA, 20 bp, Artificial Sequence
  chemically synthesized
cctcataaactcagacagcc

SEQ ID NO: 50842 - DNA, 20 bp, Artificial Sequence
  chemically synthesized
acctgttgtacctgcccttt

SEQ ID NO: 50843 - DNA, 20 bp, Artificial Sequence
  chemically synthesized
gccctttcagctctgtgacc

SEQ ID NO: 50844 - DNA, 20 bp, Artificial Sequence
  chemically synthesized
ccctttcagctctgtgaccc

SEQ ID NO: 50845 - DNA, 20 bp, Artificial Sequence
  chemically synthesized
tcagctctgtgacccgggac

SEQ ID NO: 50846 - DNA, 20 bp, Artificial Sequence
  chemically synthesized
acaagtcaccctctcccttt

SEQ ID NO: 50847 - DNA, 20 bp, Artificial Sequence
  chemically synthesized
ctctccctttgagttgccgc

SEQ ID NO: 50848 - DNA, 20 bp, Artificial Sequence
  chemically synthesized
ctccctttgagttgccgcaa

SEQ ID NO: 50849 - DNA, 20 bp, Artificial Sequence
  chemically synthesized
tccctttgagttgccgcaag

SEQ ID NO: 50850 - DNA, 20 bp, Artificial Sequence
  chemically synthesized
ttgagttgccgcaagaggta

SEQ ID NO: 50851 - DNA, 20 bp, Artificial Sequence
  chemically synthesized
agaggtacagtcacactgcc

SEQ ID NO: 50852 - DNA, 20 bp, Artificial Sequence
  chemically synthesized
aggtacagtcacactgccca

SEQ ID NO: 50853 - DNA, 20 bp, Artificial Sequence
  chemically synthesized
ggtacagtcacactgcccag

SEQ ID NO: 50854 - DNA, 20 bp, Artificial Sequence
  chemically synthesized
cacactgcccagaggattac

SEQ ID NO: 50855 - DNA, 20 bp, Artificial Sequence
  chemically synthesized
cagaggattactagaaatga

SEQ ID NO: 50856 - DNA, 20 bp, Artificial Sequence
  chemically synthesized
agaggattactagaaatgac

SEQ ID NO: 50857 - DNA, 20 bp, Artificial Sequence
  chemically synthesized
aatgacaggcctcgccctcc

SEQ ID NO: 50858 - DNA, 20 bp, Artificial Sequence
  chemically synthesized
caggcctcgccctcctggca

SEQ ID NO: 50859 - DNA, 20 bp, Artificial Sequence
  chemically synthesized
tcgccctcctggcacagacc

SEQ ID NO: 50860 - DNA, 20 bp, Artificial Sequence
  chemically synthesized
acagacctggcaccaataac

SEQ ID NO: 50861 - DNA, 20 bp, Artificial Sequence
  chemically synthesized
gacctggcaccaataactgg

SEQ ID NO: 50862 - DNA, 20 bp, Artificial Sequence
  chemically synthesized
acctggcaccaataactggc

SEQ ID NO: 50863 - DNA, 20 bp, Artificial Sequence
  chemically synthesized
accaataactggcaggtttc

SEQ ID NO: 50864 - DNA, 20 bp, Artificial Sequence
  chemically synthesized
ccaataactggcaggtttct

SEQ ID NO: 50865 - DNA, 20 bp, Artificial Sequence
  chemically synthesized
caataactggcaggtttctg

SEQ ID NO: 50866 - DNA, 20 bp, Artificial Sequence
  chemically synthesized
aactggcaggtttctggggc

SEQ ID NO: 50867 - DNA, 20 bp, Artificial Sequence
  chemically synthesized
caggtttctggggccagctg

SEQ ID NO: 50868 - DNA, 20 bp, Artificial Sequence
  chemically synthesized
ggtttctggggccagctgca

SEQ ID NO: 50869 - DNA, 20 bp, Artificial Sequence
  chemically synthesized
gtttctggggccagctgcag

SEQ ID NO: 50870 - DNA, 20 bp, Artificial Sequence
  chemically synthesized
tttctggggccagctgcaga

SEQ ID NO: 50871 - DNA, 20 bp, Artificial Sequence
  chemically synthesized
ctggggccagctgcagaggg

SEQ ID NO: 50872 - DNA, 20 bp, Artificial Sequence
  chemically synthesized
ggggccagctgcagagggaa

SEQ ID NO: 50873 - DNA, 20 bp, Artificial Sequence
  chemically synthesized
gggccagctgcagagggaag

SEQ ID NO: 50874 - DNA, 20 bp, Artificial Sequence
  chemically synthesized
gctgcagagggaagaggact

SEQ ID NO: 50875 - DNA, 20 bp, Artificial Sequence
  chemically synthesized
tgagccacctatgaaatgcc

SEQ ID NO: 50876 - DNA, 20 bp, Artificial Sequence
  chemically synthesized
gccacctatgaaatgcccag

SEQ ID NO: 50877 - DNA, 20 bp, Artificial Sequence
  chemically synthesized
ccacctatgaaatgcccagt

SEQ ID NO: 50878 - DNA, 20 bp, Artificial Sequence
  chemically synthesized
cctatgaaatgcccagtggg

SEQ ID NO: 50879 - DNA, 20 bp, Artificial Sequence
  chemically synthesized
atgcccagtgggcagcccca

SEQ ID NO: 50880 - DNA, 20 bp, Artificial Sequence
  chemically synthesized
ccagtgggcagccccacagt

SEQ ID NO: 50881 - DNA, 20 bp, Artificial Sequence
  chemically synthesized
cagtgggcagccccacagtt

SEQ ID NO: 50882 - DNA, 20 bp, Artificial Sequence
  chemically synthesized
tgggcagccccacagttggg

SEQ ID NO: 50883 - DNA, 20 bp, Artificial Sequence
  chemically synthesized
gggcagccccacagttgggc

SEQ ID NO: 50884 - DNA, 20 bp, Artificial Sequence
  chemically synthesized
ttgggcaggtctgtgtgcac

SEQ ID NO: 50885 - DNA, 20 bp, Artificial Sequence
  chemically synthesized
tgggcaggtctgtgtgcact

SEQ ID NO: 50886 - DNA, 20 bp, Artificial Sequence
  chemically synthesized
gggcaggtctgtgtgcactg

SEQ ID NO: 50887 - DNA, 20 bp, Artificial Sequence
  chemically synthesized
gcaggtctgtgtgcactggg

SEQ ID NO: 50888 - DNA, 20 bp, Artificial Sequence
  chemically synthesized
caggtctgtgtgcactgggg

SEQ ID NO: 50889 - DNA, 20 bp, Artificial Sequence
  chemically synthesized
cactggggaggtgtgtgtca

SEQ ID NO: 50890 - DNA, 20 bp, Artificial Sequence
  chemically synthesized
actggggaggtgtgtgtcat

SEQ ID NO: 50891 - DNA, 20 bp, Artificial Sequence
  chemically synthesized
gaggtgtgtgtcataggacc

SEQ ID NO: 50892 - DNA, 20 bp, Artificial Sequence
  chemically synthesized
tcctatgacacacacctccc

SEQ ID NO: 50893 - DNA, 20 bp, Artificial Sequence
  chemically synthesized
acacacctccccagtgcaca

SEQ ID NO: 50894 - DNA, 20 bp, Artificial Sequence
  chemically synthesized
cacacagacctgcccaactg

SEQ ID NO: 50895 - DNA, 20 bp, Artificial Sequence
  chemically synthesized
acacagacctgcccaactgt

SEQ ID NO: 50896 - DNA, 20 bp, Artificial Sequence
  chemically synthesized
cacagacctgcccaactgtg

SEQ ID NO: 50897 - DNA, 20 bp, Artificial Sequence
  chemically synthesized
ccaactgtggggctgcccac

SEQ ID NO: 50898 - DNA, 20 bp, Artificial Sequence
  chemically synthesized
caactgtggggctgcccact

SEQ ID NO: 50899 - DNA, 20 bp, Artificial Sequence
  chemically synthesized
gctgcccactgggcatttca

SEQ ID NO: 50900 - DNA, 20 bp, Artificial Sequence
  chemically synthesized
ctgcccactgggcatttcat

SEQ ID NO: 50901 - DNA, 20 bp, Artificial Sequence
  chemically synthesized
cccactgggcatttcatagg

SEQ ID NO: 50902 - DNA, 20 bp, Artificial Sequence
  chemically synthesized
tgggcatttcataggtggct

SEQ ID NO: 50903 - DNA, 20 bp, Artificial Sequence
  chemically synthesized
gctcagtcctcttccctctg

SEQ ID NO: 50904 - DNA, 20 bp, Artificial Sequence
  chemically synthesized
agtcctcttccctctgcagc

SEQ ID NO: 50905 - DNA, 20 bp, Artificial Sequence
  chemically synthesized
cttccctctgcagctggccc

SEQ ID NO: 50906 - DNA, 20 bp, Artificial Sequence
  chemically synthesized
agctggccccagaaacctgc

SEQ ID NO: 50907 - DNA, 20 bp, Artificial Sequence
  chemically synthesized
cccagaaacctgccagttat

SEQ ID NO: 50908 - DNA, 20 bp, Artificial Sequence
  chemically synthesized
aacctgccagttattggtgc

SEQ ID NO: 50909 - DNA, 20 bp, Artificial Sequence
  chemically synthesized
acctgccagttattggtgcc

SEQ ID NO: 50910 - DNA, 20 bp, Artificial Sequence
  chemically synthesized
tattggtgccaggtctgtgc

SEQ ID NO: 50911 - DNA, 20 bp, Artificial Sequence
  chemically synthesized
attggtgccaggtctgtgcc

SEQ ID NO: 50912 - DNA, 20 bp, Artificial Sequence
  chemically synthesized
tggtgccaggtctgtgccag

SEQ ID NO: 50913 - DNA, 20 bp, Artificial Sequence
  chemically synthesized
ggtgccaggtctgtgccagg

SEQ ID NO: 50914 - DNA, 20 bp, Artificial Sequence
  chemically synthesized
gtgccaggtctgtgccagga

SEQ ID NO: 50915 - DNA, 20 bp, Artificial Sequence
  chemically synthesized
caggtctgtgccaggagggc

SEQ ID NO: 50916 - DNA, 20 bp, Artificial Sequence
  chemically synthesized
aggtctgtgccaggagggcg

SEQ ID NO: 50917 - DNA, 20 bp, Artificial Sequence
  chemically synthesized
agggcgaggcctgtcatttc

SEQ ID NO: 50918 - DNA, 20 bp, Artificial Sequence
  chemically synthesized
tgtcatttctagtaatcctc

SEQ ID NO: 50919 - DNA, 20 bp, Artificial Sequence
  chemically synthesized
gtcatttctagtaatcctct

SEQ ID NO: 50920 - DNA, 20 bp, Artificial Sequence
  chemically synthesized
atttctagtaatcctctggg

SEQ ID NO: 50921 - DNA, 20 bp, Artificial Sequence
  chemically synthesized
cagtgtgactgtacctcttg

SEQ ID NO: 50922 - DNA, 20 bp, Artificial Sequence
  chemically synthesized
gtacctcttgcggcaactca

SEQ ID NO: 50923 - DNA, 20 bp, Artificial Sequence
  chemically synthesized
tacctcttgcggcaactcaa

SEQ ID NO: 50924 - DNA, 20 bp, Artificial Sequence
  chemically synthesized
acctcttgcggcaactcaaa

SEQ ID NO: 50925 - DNA, 20 bp, Artificial Sequence
  chemically synthesized
ctcttgcggcaactcaaagg

SEQ ID NO: 50926 - DNA, 20 bp, Artificial Sequence
  chemically synthesized
cttgcggcaactcaaaggga

SEQ ID NO: 50927 - DNA, 20 bp, Artificial Sequence
  chemically synthesized
ttgcggcaactcaaagggag

SEQ ID NO: 50928 - DNA, 20 bp, Artificial Sequence
  chemically synthesized
tgcggcaactcaaagggaga

SEQ ID NO: 50929 - DNA, 20 bp, Artificial Sequence
  chemically synthesized
agggagagggtgacttgtcc

SEQ ID NO: 50930 - DNA, 20 bp, Artificial Sequence
  chemically synthesized
gggagagggtgacttgtccc

SEQ ID NO: 50931 - DNA, 20 bp, Artificial Sequence
  chemically synthesized
gggtgacttgtcccgggtca

SEQ ID NO: 50932 - DNA, 20 bp, Artificial Sequence
  chemically synthesized
gtgacttgtcccgggtcaca

SEQ ID NO: 50933 - DNA, 20 bp, Artificial Sequence
  chemically synthesized
gtcccgggtcacagagctga

SEQ ID NO: 50934 - DNA, 20 bp, Artificial Sequence
  chemically synthesized
tcccgggtcacagagctgaa

SEQ ID NO: 50935 - DNA, 20 bp, Artificial Sequence
  chemically synthesized
cccgggtcacagagctgaaa

SEQ ID NO: 50936 - DNA, 20 bp, Artificial Sequence
  chemically synthesized
gggtcacagagctgaaaggg

SEQ ID NO: 50937 - DNA, 20 bp, Artificial Sequence
  chemically synthesized
ggtcacagagctgaaagggc

SEQ ID NO: 50938 - DNA, 20 bp, Artificial Sequence
  chemically synthesized
agctgaaagggcaggtacaa

SEQ ID NO: 50939 - DNA, 20 bp, Artificial Sequence
  chemically synthesized
gctgaaagggcaggtacaac

SEQ ID NO: 50940 - DNA, 20 bp, Artificial Sequence
  chemically synthesized
aggtacaacaggtgacatgc

SEQ ID NO: 50941 - DNA, 20 bp, Artificial Sequence
  chemically synthesized
ggtacaacaggtgacatgcc

SEQ ID NO: 50942 - DNA, 20 bp, Artificial Sequence
  chemically synthesized
ggtgacatgccgggctgtct

SEQ ID NO: 50943 - DNA, 20 bp, Artificial Sequence
  chemically synthesized
gccgggctgtctgagtttat

SEQ ID NO: 50944 - DNA, 20 bp, Artificial Sequence
  chemically synthesized
ccgggctgtctgagtttatg

SEQ ID NO: 50945 - DNA, 20 bp, Artificial Sequence
  chemically synthesized
cgggctgtctgagtttatga

SEQ ID NO: 50946 - DNA, 20 bp, Artificial Sequence
  chemically synthesized
tgtctgagtttatgagggcc

SEQ ID NO: 50947 - DNA, 20 bp, Artificial Sequence
  chemically synthesized
gggcccagtcttgtgtctgc

SEQ ID NO: 50948 - DNA, 20 bp, Artificial Sequence
  chemically synthesized
ggcccagtcttgtgtctgcc

SEQ ID NO: 50949 - DNA, 20 bp, Artificial Sequence
  chemically synthesized
tcttgtgtctgccgggcaat

SEQ ID NO: 50950 - DNA, 20 bp, Artificial Sequence
  chemically synthesized
gtgtctgccgggcaatgagc

SEQ ID NO: 50951 - DNA, 20 bp, Artificial Sequence
  chemically synthesized
tgtctgccgggcaatgagca

SEQ ID NO: 50952 - DNA, 20 bp, Artificial Sequence
  chemically synthesized
agcaaggctccttcctgtcc

SEQ ID NO: 50953 - DNA, 20 bp, Artificial Sequence
  chemically synthesized
ccaagctccccgcccctccc

SEQ ID NO: 50954 - DNA, 20 bp, Artificial Sequence
  chemically synthesized
cagcctactgcctccacccg

SEQ ID NO: 50955 - DNA, 20 bp, Artificial Sequence
  chemically synthesized
tccacccgaagtctacttcc

SEQ ID NO: 50956 - DNA, 20 bp, Artificial Sequence
  chemically synthesized
ccacccgaagtctacttcct

SEQ ID NO: 50957 - DNA, 20 bp, Artificial Sequence
  chemically synthesized
cccgaagtctacttcctggg

SEQ ID NO: 50958 - DNA, 20 bp, Artificial Sequence
  chemically synthesized
ccgaagtctacttcctgggt

SEQ ID NO: 50959 - DNA, 20 bp, Artificial Sequence
  chemically synthesized
aagtctacttcctgggtggg

SEQ ID NO: 50960 - DNA, 20 bp, Artificial Sequence
  chemically synthesized
agtctacttcctgggtgggc

SEQ ID NO: 50961 - DNA, 20 bp, Artificial Sequence
  chemically synthesized
cttcctgggtgggcaggaac

SEQ ID NO: 50962 - DNA, 20 bp, Artificial Sequence
  chemically synthesized
ttcctgggtgggcaggaact

SEQ ID NO: 50963 - DNA, 20 bp, Artificial Sequence
  chemically synthesized
caggaactgggcactgtgcc

SEQ ID NO: 50964 - DNA, 20 bp, Artificial Sequence
  chemically synthesized
aggaactgggcactgtgccc

SEQ ID NO: 50965 - DNA, 20 bp, Artificial Sequence
  chemically synthesized
ggaactgggcactgtgccca

SEQ ID NO: 50966 - DNA, 20 bp, Artificial Sequence
  chemically synthesized
gggcatgcactgcctccacg

SEQ ID NO: 50967 - DNA, 20 bp, Artificial Sequence
  chemically synthesized
tgcctccacgcagcaaccct

SEQ ID NO: 50968 - DNA, 20 bp, Artificial Sequence
  chemically synthesized
cctccacgcagcaaccctca

SEQ ID NO: 50969 - DNA, 20 bp, Artificial Sequence
  chemically synthesized
gcagcaaccctcagagtcct

SEQ ID NO: 50970 - DNA, 20 bp, Artificial Sequence
  chemically synthesized
tcagagtcctgagctgaacc

SEQ ID NO: 50971 - DNA, 20 bp, Artificial Sequence
  chemically synthesized
gagtcctgagctgaaccaag

SEQ ID NO: 50972 - DNA, 20 bp, Artificial Sequence
  chemically synthesized
agtcctgagctgaaccaaga

SEQ ID NO: 50973 - DNA, 20 bp, Artificial Sequence
  chemically synthesized
tcctgagctgaaccaagaag

SEQ ID NO: 50974 - DNA, 20 bp, Artificial Sequence
  chemically synthesized
cctgagctgaaccaagaagg

SEQ ID NO: 50975 - DNA, 20 bp, Artificial Sequence
  chemically synthesized
tgagctgaaccaagaaggag

SEQ ID NO: 50976 - DNA, 20 bp, Artificial Sequence
  chemically synthesized
gagctgaaccaagaaggagg

SEQ ID NO: 50977 - DNA, 20 bp, Artificial Sequence
  chemically synthesized
agctgaaccaagaaggagga

SEQ ID NO: 50978 - DNA, 20 bp, Artificial Sequence
  chemically synthesized
gctgaaccaagaaggaggag

SEQ ID NO: 50979 - DNA, 20 bp, Artificial Sequence
  chemically synthesized
ctgaaccaagaaggaggagg

SEQ ID NO: 50980 - DNA, 20 bp, Artificial Sequence
  chemically synthesized
accaagaaggaggagggggt

SEQ ID NO: 50981 - DNA, 20 bp, Artificial Sequence
  chemically synthesized
ccaagaaggaggagggggtc

SEQ ID NO: 50982 - DNA, 20 bp, Artificial Sequence
  chemically synthesized
gaggagggggtcgggcctcc

SEQ ID NO: 50983 - DNA, 20 bp, Artificial Sequence
  chemically synthesized
aggagggggtcgggcctccg

SEQ ID NO: 50984 - DNA, 20 bp, Artificial Sequence
  chemically synthesized
agggggtcgggcctccgagg

SEQ ID NO: 50985 - DNA, 20 bp, Artificial Sequence
  chemically synthesized
gggggtcgggcctccgagga

SEQ ID NO: 50986 - DNA, 20 bp, Artificial Sequence
  chemically synthesized
tcgggcctccgaggaaggcc

SEQ ID NO: 50987 - DNA, 20 bp, Artificial Sequence
  chemically synthesized
ggcctagccgctgctgctgc

SEQ ID NO: 50988 - DNA, 20 bp, Artificial Sequence
  chemically synthesized
gcctagccgctgctgctgcc

SEQ ID NO: 50989 - DNA, 20 bp, Artificial Sequence
  chemically synthesized
gctgctgctgccaggaattc

SEQ ID NO: 50990 - DNA, 20 bp, Artificial Sequence
  chemically synthesized
ctgctgctgccaggaattcc

SEQ ID NO: 50991 - DNA, 20 bp, Artificial Sequence
  chemically synthesized
tgctgccaggaattccaggt

SEQ ID NO: 50992 - DNA, 20 bp, Artificial Sequence
  chemically synthesized
ctgccaggaattccaggttg

SEQ ID NO: 50993 - DNA, 20 bp, Artificial Sequence
  chemically synthesized
tgccaggaattccaggttgg

SEQ ID NO: 50994 - DNA, 20 bp, Artificial Sequence
  chemically synthesized
gccaggaattccaggttgga

SEQ ID NO: 50995 - DNA, 20 bp, Artificial Sequence
  chemically synthesized
ccaggaattccaggttggag

SEQ ID NO: 50996 - DNA, 20 bp, Artificial Sequence
  chemically synthesized
ggaattccaggttggagggg

SEQ ID NO: 50997 - DNA, 20 bp, Artificial Sequence
  chemically synthesized
gaggggcggcaacctcctgc

SEQ ID NO: 50998 - DNA, 20 bp, Artificial Sequence
  chemically synthesized
ggcaacctcctgccagcctt

SEQ ID NO: 50999 - DNA, 20 bp, Artificial Sequence
  chemically synthesized
gcaacctcctgccagccttc

SEQ ID NO: 51000 - DNA, 20 bp, Artificial Sequence
  chemically synthesized
ggccactctcctgtgcctgc

SEQ ID NO: 51001 - DNA, 20 bp, Artificial Sequence
  chemically synthesized
cactctcctgtgcctgccag

SEQ ID NO: 51002 - DNA, 20 bp, Artificial Sequence
  chemically synthesized
ctctcctgtgcctgccagaa

SEQ ID NO: 51003 - DNA, 20 bp, Artificial Sequence
  chemically synthesized
cctgtgcctgccagaagaga

SEQ ID NO: 51004 - DNA, 20 bp, Artificial Sequence
  chemically synthesized
tgtgcctgccagaagagaca

SEQ ID NO: 51005 - DNA, 20 bp, Artificial Sequence
  chemically synthesized
tgccagaagagacagagctt

SEQ ID NO: 51006 - DNA, 20 bp, Artificial Sequence
  chemically synthesized
gccagaagagacagagcttg

SEQ ID NO: 51007 - DNA, 20 bp, Artificial Sequence
  chemically synthesized
cagaagagacagagcttgag

SEQ ID NO: 51008 - DNA, 20 bp, Artificial Sequence
  chemically synthesized
gaagagacagagcttgagga

SEQ ID NO: 51009 - DNA, 20 bp, Artificial Sequence
  chemically synthesized
acagagcttgaggagagctt

SEQ ID NO: 51010 - DNA, 20 bp, Artificial Sequence
  chemically synthesized
cagagcttgaggagagcttg

SEQ ID NO: 51011 - DNA, 20 bp, Artificial Sequence
  chemically synthesized
gagcttgaggagagcttgag

SEQ ID NO: 51012 - DNA, 20 bp, Artificial Sequence
  chemically synthesized
gcttgaggagagcttgagga

SEQ ID NO: 51013 - DNA, 20 bp, Artificial Sequence
  chemically synthesized
tgaggagagcttgaggagag

SEQ ID NO: 51014 - DNA, 20 bp, Artificial Sequence
  chemically synthesized
gaggagagcttgaggagagc

SEQ ID NO: 51015 - DNA, 20 bp, Artificial Sequence
  chemically synthesized
agagcttgaggagagcagga

SEQ ID NO: 51016 - DNA, 20 bp, Artificial Sequence
  chemically synthesized
gagcttgaggagagcaggaa

SEQ ID NO: 51017 - DNA, 20 bp, Artificial Sequence
  chemically synthesized
cttgaggagagcaggaaagg

SEQ ID NO: 51018 - DNA, 20 bp, Artificial Sequence
  chemically synthesized
ttgaggagagcaggaaaggt

SEQ ID NO: 51019 - DNA, 20 bp, Artificial Sequence
  chemically synthesized
cattgctgctgctgctcact

SEQ ID NO: 51020 - DNA, 20 bp, Artificial Sequence
  chemically synthesized
ctgctgctcactcagttcca

SEQ ID NO: 51021 - DNA, 20 bp, Artificial Sequence
  chemically synthesized
tgctgctcactcagttccac

SEQ ID NO: 51022 - DNA, 20 bp, Artificial Sequence
  chemically synthesized
tgctcactcagttccacagg

SEQ ID NO: 51023 - DNA, 20 bp, Artificial Sequence
  chemically synthesized
gctcactcagttccacaggt

SEQ ID NO: 51024 - DNA, 20 bp, Artificial Sequence
  chemically synthesized
tcactcagttccacaggtgg

SEQ ID NO: 51025 - DNA, 20 bp, Artificial Sequence
  chemically synthesized
cactcagttccacaggtggg

SEQ ID NO: 51026 - DNA, 20 bp, Artificial Sequence
  chemically synthesized
actcagttccacaggtggga

SEQ ID NO: 51027 - DNA, 20 bp, Artificial Sequence
  chemically synthesized
agttccacaggtgggaggga

SEQ ID NO: 51028 - DNA, 20 bp, Artificial Sequence
  chemically synthesized
tccacaggtgggagggacag

SEQ ID NO: 51029 - DNA, 20 bp, Artificial Sequence
  chemically synthesized
ccacaggtgggagggacagc

SEQ ID NO: 51030 - DNA, 20 bp, Artificial Sequence
  chemically synthesized
cacaggtgggagggacagca

SEQ ID NO: 51031 - DNA, 20 bp, Artificial Sequence
  chemically synthesized
gtgggagggacagcagggct

SEQ ID NO: 51032 - DNA, 20 bp, Artificial Sequence
  chemically synthesized
gggagggacagcagggctta

SEQ ID NO: 51033 - DNA, 20 bp, Artificial Sequence
  chemically synthesized
agggacagcagggcttagag

SEQ ID NO: 51034 - DNA, 20 bp, Artificial Sequence
  chemically synthesized
gggacagcagggcttagagt

SEQ ID NO: 51035 - DNA, 20 bp, Artificial Sequence
  chemically synthesized
ggacagcagggcttagagtg

SEQ ID NO: 51036 - DNA, 20 bp, Artificial Sequence
  chemically synthesized
gacagcagggcttagagtgg

SEQ ID NO: 51037 - DNA, 20 bp, Artificial Sequence
  chemically synthesized
ttagagtgggggtcattgtg

SEQ ID NO: 51038 - DNA, 20 bp, Artificial Sequence
  chemically synthesized
agtgggggtcattgtgcaga

SEQ ID NO: 51039 - DNA, 20 bp, Artificial Sequence
  chemically synthesized
gtgggggtcattgtgcagat

SEQ ID NO: 51040 - DNA, 20 bp, Artificial Sequence
  chemically synthesized
attgtgcagatgggaaaaca

SEQ ID NO: 51041 - DNA, 20 bp, Artificial Sequence
  chemically synthesized
ttgtgcagatgggaaaacaa

SEQ ID NO: 51042 - DNA, 20 bp, Artificial Sequence
  chemically synthesized
cagatgggaaaacaaaggcc

SEQ ID NO: 51043 - DNA, 20 bp, Artificial Sequence
  chemically synthesized
gatgggaaaacaaaggccca

SEQ ID NO: 51044 - DNA, 20 bp, Artificial Sequence
  chemically synthesized
tgggaaaacaaaggcccaga

SEQ ID NO: 51045 - DNA, 20 bp, Artificial Sequence
  chemically synthesized
gggaaaacaaaggcccagag

SEQ ID NO: 51046 - DNA, 20 bp, Artificial Sequence
  chemically synthesized
ggaaaacaaaggcccagaga

SEQ ID NO: 51047 - DNA, 20 bp, Artificial Sequence
  chemically synthesized
gaaaacaaaggcccagagag

SEQ ID NO: 51048 - DNA, 20 bp, Artificial Sequence
  chemically synthesized
aacaaaggcccagagagggg

SEQ ID NO: 51049 - DNA, 20 bp, Artificial Sequence
  chemically synthesized
cagagaggggaagaaatgcc

SEQ ID NO: 51050 - DNA, 20 bp, Artificial Sequence
  chemically synthesized
agagaggggaagaaatgccc

SEQ ID NO: 51051 - DNA, 20 bp, Artificial Sequence
  chemically synthesized
agaggggaagaaatgcccag

SEQ ID NO: 51052 - DNA, 20 bp, Artificial Sequence
  chemically synthesized
agaaatgcccaggagctacc

SEQ ID NO: 51053 - DNA, 20 bp, Artificial Sequence
  chemically synthesized
gaaatgcccaggagctaccg

SEQ ID NO: 51054 - DNA, 20 bp, Artificial Sequence
  chemically synthesized
aaatgcccaggagctaccga

SEQ ID NO: 51055 - DNA, 20 bp, Artificial Sequence
  chemically synthesized
tgcccaggagctaccgaggg

SEQ ID NO: 51056 - DNA, 20 bp, Artificial Sequence
  chemically synthesized
gcccaggagctaccgagggc

SEQ ID NO: 51057 - DNA, 20 bp, Artificial Sequence
  chemically synthesized
agggcaggcgacctcaacca

SEQ ID NO: 51058 - DNA, 20 bp, Artificial Sequence
  chemically synthesized
aggcgacctcaaccacagcc

SEQ ID NO: 51059 - DNA, 20 bp, Artificial Sequence
  chemically synthesized
cctcaaccacagcccagtgc

SEQ ID NO: 51060 - DNA, 20 bp, Artificial Sequence
  chemically synthesized
tcaaccacagcccagtgctg

SEQ ID NO: 51061 - DNA, 20 bp, Artificial Sequence
  chemically synthesized
cagcccagtgctggagctgt

SEQ ID NO: 51062 - DNA, 20 bp, Artificial Sequence
  chemically synthesized
cccagtgctggagctgtgag

SEQ ID NO: 51063 - DNA, 20 bp, Artificial Sequence
  chemically synthesized
gctggagctgtgagtggatg

SEQ ID NO: 51064 - DNA, 20 bp, Artificial Sequence
  chemically synthesized
tggagctgtgagtggatgta

SEQ ID NO: 51065 - DNA, 20 bp, Artificial Sequence
  chemically synthesized
agctgtgagtggatgtagag

SEQ ID NO: 51066 - DNA, 20 bp, Artificial Sequence
  chemically synthesized
tgtgagtggatgtagagcag

SEQ ID NO: 51067 - DNA, 20 bp, Artificial Sequence
  chemically synthesized
agagcagcggaatatccatt

SEQ ID NO: 51068 - DNA, 20 bp, Artificial Sequence
  chemically synthesized
cagcggaatatccattcagc

SEQ ID NO: 51069 - DNA, 20 bp, Artificial Sequence
  chemically synthesized
gaatatccattcagccagct

SEQ ID NO: 51070 - DNA, 20 bp, Artificial Sequence
  chemically synthesized
aatatccattcagccagctc

SEQ ID NO: 51071 - DNA, 20 bp, Artificial Sequence
  chemically synthesized
atatccattcagccagctca

SEQ ID NO: 51072 - DNA, 20 bp, Artificial Sequence
  chemically synthesized
tatccattcagccagctcag

SEQ ID NO: 51073 - DNA, 20 bp, Artificial Sequence
  chemically synthesized
ccattcagccagctcagggg

SEQ ID NO: 51074 - DNA, 20 bp, Artificial Sequence
  chemically synthesized
cattcagccagctcagggga

SEQ ID NO: 51075 - DNA, 20 bp, Artificial Sequence
  chemically synthesized
cagccagctcaggggaagga

SEQ ID NO: 51076 - DNA, 20 bp, Artificial Sequence
  chemically synthesized
agccagctcaggggaaggac

SEQ ID NO: 51077 - DNA, 20 bp, Artificial Sequence
  chemically synthesized
gccagctcaggggaaggaca

SEQ ID NO: 51078 - DNA, 20 bp, Artificial Sequence
  chemically synthesized
ccagctcaggggaaggacag

SEQ ID NO: 51079 - DNA, 20 bp, Artificial Sequence
  chemically synthesized
ggggaaggacaggggccctg

SEQ ID NO: 51080 - DNA, 20 bp, Artificial Sequence
  chemically synthesized
aaggacaggggccctgaagc

SEQ ID NO: 51081 - DNA, 20 bp, Artificial Sequence
  chemically synthesized
aggacaggggccctgaagcc

SEQ ID NO: 51082 - DNA, 20 bp, Artificial Sequence
  chemically synthesized
ggacaggggccctgaagcca

SEQ ID NO: 51083 - DNA, 20 bp, Artificial Sequence
  chemically synthesized
gacaggggccctgaagccag

SEQ ID NO: 51084 - DNA, 20 bp, Artificial Sequence
  chemically synthesized
ggggccctgaagccagggga

SEQ ID NO: 51085 - DNA, 20 bp, Artificial Sequence
  chemically synthesized
ggccctgaagccaggggatg

SEQ ID NO: 51086 - DNA, 20 bp, Artificial Sequence
  chemically synthesized
gaagccaggggatggagctg

SEQ ID NO: 51087 - DNA, 20 bp, Artificial Sequence
  chemically synthesized
aagccaggggatggagctgc

SEQ ID NO: 51088 - DNA, 20 bp, Artificial Sequence
  chemically synthesized
agccaggggatggagctgca

SEQ ID NO: 51089 - DNA, 20 bp, Artificial Sequence
  chemically synthesized
caggggatggagctgcaggg

SEQ ID NO: 51090 - DNA, 20 bp, Artificial Sequence
  chemically synthesized
aggggatggagctgcaggga

SEQ ID NO: 51091 - DNA, 20 bp, Artificial Sequence
  chemically synthesized
ggggatggagctgcagggaa

SEQ ID NO: 51092 - DNA, 20 bp, Artificial Sequence
  chemically synthesized
ggatggagctgcagggaagg

SEQ ID NO: 51093 - DNA, 20 bp, Artificial Sequence
  chemically synthesized
gagctgcagggaagggagct

SEQ ID NO: 51094 - DNA, 20 bp, Artificial Sequence
  chemically synthesized
gctgcagggaagggagctca

SEQ ID NO: 51095 - DNA, 20 bp, Artificial Sequence
  chemically synthesized
tgcagggaagggagctcaga

SEQ ID NO: 51096 - DNA, 20 bp, Artificial Sequence
  chemically synthesized
agggaagggagctcagagag

SEQ ID NO: 51097 - DNA, 20 bp, Artificial Sequence
  chemically synthesized
gggaagggagctcagagaga

SEQ ID NO: 51098 - DNA, 20 bp, Artificial Sequence
  chemically synthesized
ggaagggagctcagagagaa

SEQ ID NO: 51099 - DNA, 20 bp, Artificial Sequence
  chemically synthesized
gaagggagctcagagagaag

SEQ ID NO: 51100 - DNA, 20 bp, Artificial Sequence
  chemically synthesized
agggagctcagagagaaggg

SEQ ID NO: 51101 - DNA, 20 bp, Artificial Sequence
  chemically synthesized
gggagctcagagagaagggg

SEQ ID NO: 51102 - DNA, 20 bp, Artificial Sequence
  chemically synthesized
ggagctcagagagaagggga

SEQ ID NO: 51103 - DNA, 20 bp, Artificial Sequence
  chemically synthesized
gagctcagagagaaggggag

SEQ ID NO: 51104 - DNA, 20 bp, Artificial Sequence
  chemically synthesized
gctcagagagaaggggaggg

SEQ ID NO: 51105 - DNA, 20 bp, Artificial Sequence
  chemically synthesized
agagaaggggaggggagtct

SEQ ID NO: 51106 - DNA, 20 bp, Artificial Sequence
  chemically synthesized
aggggaggggagtctgagct

SEQ ID NO: 51107 - DNA, 20 bp, Artificial Sequence
  chemically synthesized
ctcagtttcccgctgcctga

SEQ ID NO: 51108 - DNA, 20 bp, Artificial Sequence
  chemically synthesized
tcagtttcccgctgcctgaa

SEQ ID NO: 51109 - DNA, 20 bp, Artificial Sequence
  chemically synthesized
agtttcccgctgcctgaaag

SEQ ID NO: 51110 - DNA, 20 bp, Artificial Sequence
  chemically synthesized
gtttcccgctgcctgaaagg

SEQ ID NO: 51111 - DNA, 20 bp, Artificial Sequence
  chemically synthesized
tttcccgctgcctgaaagga

SEQ ID NO: 51112 - DNA, 20 bp, Artificial Sequence
  chemically synthesized
cccgctgcctgaaaggaggg

SEQ ID NO: 51113 - DNA, 20 bp, Artificial Sequence
  chemically synthesized
ggtggtacctactcccttca

SEQ ID NO: 51114 - DNA, 20 bp, Artificial Sequence
  chemically synthesized
gtggtacctactcccttcac

SEQ ID NO: 51115 - DNA, 20 bp, Artificial Sequence
  chemically synthesized
tggtacctactcccttcaca

SEQ ID NO: 51116 - DNA, 20 bp, Artificial Sequence
  chemically synthesized
ccttcacagggtaactgaat

SEQ ID NO: 51117 - DNA, 20 bp, Artificial Sequence
  chemically synthesized
ttcacagggtaactgaatga

SEQ ID NO: 51118 - DNA, 20 bp, Artificial Sequence
  chemically synthesized
taactgaatgagagactgcc

SEQ ID NO: 51119 - DNA, 20 bp, Artificial Sequence
  chemically synthesized
actgaatgagagactgcctg

SEQ ID NO: 51120 - DNA, 20 bp, Artificial Sequence
  chemically synthesized
ctgaatgagagactgcctgg

SEQ ID NO: 51121 - DNA, 20 bp, Artificial Sequence
  chemically synthesized
atgagagactgcctggagga

SEQ ID NO: 51122 - DNA, 20 bp, Artificial Sequence
  chemically synthesized
tgcctggaggaaagctcttc

SEQ ID NO: 51123 - DNA, 20 bp, Artificial Sequence
  chemically synthesized
ggaggaaagctcttcaagtg

SEQ ID NO: 51124 - DNA, 20 bp, Artificial Sequence
  chemically synthesized
aagtgtggcccaccccaccc

SEQ ID NO: 51125 - DNA, 20 bp, Artificial Sequence
  chemically synthesized
ccaccccaccccagtgacac

SEQ ID NO: 51126 - DNA, 20 bp, Artificial Sequence
  chemically synthesized
agtgacaccagcccctgaca

SEQ ID NO: 51127 - DNA, 20 bp, Artificial Sequence
  chemically synthesized
gtgacaccagcccctgacac

SEQ ID NO: 51128 - DNA, 20 bp, Artificial Sequence
  chemically synthesized
tgacaccagcccctgacacg

SEQ ID NO: 51129 - DNA, 20 bp, Artificial Sequence
  chemically synthesized
gacaccagcccctgacacgg

SEQ ID NO: 51130 - DNA, 20 bp, Artificial Sequence
  chemically synthesized
caccagcccctgacacgggg

SEQ ID NO: 51131 - DNA, 20 bp, Artificial Sequence
  chemically synthesized
accagcccctgacacggggg

SEQ ID NO: 51132 - DNA, 20 bp, Artificial Sequence
  chemically synthesized
ccagcccctgacacggggga

SEQ ID NO: 51133 - DNA, 20 bp, Artificial Sequence
  chemically synthesized
agcccctgacacgggggagg

SEQ ID NO: 51134 - DNA, 20 bp, Artificial Sequence
  chemically synthesized
gcccctgacacgggggaggg

SEQ ID NO: 51135 - DNA, 20 bp, Artificial Sequence
  chemically synthesized
cccctgacacgggggaggga

SEQ ID NO: 51136 - DNA, 20 bp, Artificial Sequence
  chemically synthesized
ctgacacgggggagggaggg

SEQ ID NO: 51137 - DNA, 20 bp, Artificial Sequence
  chemically synthesized
cgggggagggagggcagcat

SEQ ID NO: 51138 - DNA, 20 bp, Artificial Sequence
  chemically synthesized
gggggagggagggcagcatc

SEQ ID NO: 51139 - DNA, 20 bp, Artificial Sequence
  chemically synthesized
gggagggagggcagcatcag

SEQ ID NO: 51140 - DNA, 20 bp, Artificial Sequence
  chemically synthesized
ggagggagggcagcatcagg

SEQ ID NO: 51141 - DNA, 20 bp, Artificial Sequence
  chemically synthesized
gagggagggcagcatcagga

SEQ ID NO: 51142 - DNA, 20 bp, Artificial Sequence
  chemically synthesized
agggagggcagcatcaggag

SEQ ID NO: 51143 - DNA, 20 bp, Artificial Sequence
  chemically synthesized
cagcatcaggaggggctttc

SEQ ID NO: 51144 - DNA, 20 bp, Artificial Sequence
  chemically synthesized
agcatcaggaggggctttct

SEQ ID NO: 51145 - DNA, 20 bp, Artificial Sequence
  chemically synthesized
aggggctttctgggcacacc

SEQ ID NO: 51146 - DNA, 20 bp, Artificial Sequence
  chemically synthesized
cacacccagtacccgtctct

SEQ ID NO: 51147 - DNA, 20 bp, Artificial Sequence
  chemically synthesized
ctgttgcattttaatcctca

SEQ ID NO: 51148 - DNA, 20 bp, Artificial Sequence
  chemically synthesized
ttgcattttaatcctcacag

SEQ ID NO: 51149 - DNA, 20 bp, Artificial Sequence
  chemically synthesized
aatcctcacagcagctcaac

SEQ ID NO: 51150 - DNA, 20 bp, Artificial Sequence
  chemically synthesized
atcctcacagcagctcaaca

SEQ ID NO: 51151 - DNA, 20 bp, Artificial Sequence
  chemically synthesized
ccgtcaccatccccatttta

SEQ ID NO: 51152 - DNA, 20 bp, Artificial Sequence
  chemically synthesized
caccatccccattttacaga

SEQ ID NO: 51153 - DNA, 20 bp, Artificial Sequence
  chemically synthesized
accatccccattttacagat

SEQ ID NO: 51154 - DNA, 20 bp, Artificial Sequence
  chemically synthesized
ccatccccattttacagata

SEQ ID NO: 51155 - DNA, 20 bp, Artificial Sequence
  chemically synthesized
attttacagatagggaaatt

SEQ ID NO: 51156 - DNA, 20 bp, Artificial Sequence
  chemically synthesized
ttttacagatagggaaattg

SEQ ID NO: 51157 - DNA, 20 bp, Artificial Sequence
  chemically synthesized
cagatagggaaattgaggct

SEQ ID NO: 51158 - DNA, 20 bp, Artificial Sequence
  chemically synthesized
gatagggaaattgaggctcg

SEQ ID NO: 51159 - DNA, 20 bp, Artificial Sequence
  chemically synthesized
agggaaattgaggctcggag

SEQ ID NO: 51160 - DNA, 20 bp, Artificial Sequence
  chemically synthesized
agcggttaaacaactcacct

SEQ ID NO: 51161 - DNA, 20 bp, Artificial Sequence
  chemically synthesized
gcggttaaacaactcacctg

SEQ ID NO: 51162 - DNA, 20 bp, Artificial Sequence
  chemically synthesized
acaactcacctgaggcctca

SEQ ID NO: 51163 - DNA, 20 bp, Artificial Sequence
  chemically synthesized
ctcacctgaggcctcacagc

SEQ ID NO: 51164 - DNA, 20 bp, Artificial Sequence
  chemically synthesized
cctgaggcctcacagccagt

SEQ ID NO: 51165 - DNA, 20 bp, Artificial Sequence
  chemically synthesized
gaggcctcacagccagtaag

SEQ ID NO: 51166 - DNA, 20 bp, Artificial Sequence
  chemically synthesized
aggcctcacagccagtaagt

SEQ ID NO: 51167 - DNA, 20 bp, Artificial Sequence
  chemically synthesized
cagccagtaagtgggttccc

SEQ ID NO: 51168 - DNA, 20 bp, Artificial Sequence
  chemically synthesized
cctggtctgaatgtgtgtgc

SEQ ID NO: 51169 - DNA, 20 bp, Artificial Sequence
  chemically synthesized
tggtctgaatgtgtgtgctg

SEQ ID NO: 51170 - DNA, 20 bp, Artificial Sequence
  chemically synthesized
ggtctgaatgtgtgtgctgg

SEQ ID NO: 51171 - DNA, 20 bp, Artificial Sequence
  chemically synthesized
gtgtgtgctggaggatcctg

SEQ ID NO: 51172 - DNA, 20 bp, Artificial Sequence
  chemically synthesized
tgtgtgctggaggatcctgt

SEQ ID NO: 51173 - DNA, 20 bp, Artificial Sequence
  chemically synthesized
gatcctgtgggtcactcgcc

SEQ ID NO: 51174 - DNA, 20 bp, Artificial Sequence
  chemically synthesized
cctgtgggtcactcgcctgg

SEQ ID NO: 51175 - DNA, 20 bp, Artificial Sequence
  chemically synthesized
tgtgggtcactcgcctggta

SEQ ID NO: 51176 - DNA, 20 bp, Artificial Sequence
  chemically synthesized
cactcgcctggtagagcccc

SEQ ID NO: 51177 - DNA, 20 bp, Artificial Sequence
  chemically synthesized
actcgcctggtagagcccca

SEQ ID NO: 51178 - DNA, 20 bp, Artificial Sequence
  chemically synthesized
cgcctggtagagccccaagg

SEQ ID NO: 51179 - DNA, 20 bp, Artificial Sequence
  chemically synthesized
cctggtagagccccaaggtg

SEQ ID NO: 51180 - DNA, 20 bp, Artificial Sequence
  chemically synthesized
ctggtagagccccaaggtgg

SEQ ID NO: 51181 - DNA, 20 bp, Artificial Sequence
  chemically synthesized
ccccaaggtggaggcataaa

SEQ ID NO: 51182 - DNA, 20 bp, Artificial Sequence
  chemically synthesized
cccaaggtggaggcataaat

SEQ ID NO: 51183 - DNA, 20 bp, Artificial Sequence
  chemically synthesized
ggtggaggcataaatgggac

SEQ ID NO: 51184 - DNA, 20 bp, Artificial Sequence
  chemically synthesized
taaatgggactggtgaatga

SEQ ID NO: 51185 - DNA, 20 bp, Artificial Sequence
  chemically synthesized
atgggactggtgaatgacag

SEQ ID NO: 51186 - DNA, 20 bp, Artificial Sequence
  chemically synthesized
tgggactggtgaatgacaga

SEQ ID NO: 51187 - DNA, 20 bp, Artificial Sequence
  chemically synthesized
gggactggtgaatgacagaa

SEQ ID NO: 51188 - DNA, 20 bp, Artificial Sequence
  chemically synthesized
ggactggtgaatgacagaag

SEQ ID NO: 51189 - DNA, 20 bp, Artificial Sequence
  chemically synthesized
cactcatccattcactctgc

SEQ ID NO: 51190 - DNA, 20 bp, Artificial Sequence
  chemically synthesized
attcactctgcaagtatcta

SEQ ID NO: 51191 - DNA, 20 bp, Artificial Sequence
  chemically synthesized
agtatctacggcacgtacgc

SEQ ID NO: 51192 - DNA, 20 bp, Artificial Sequence
  chemically synthesized
cggcacgtacgccagctccc

SEQ ID NO: 51193 - DNA, 20 bp, Artificial Sequence
  chemically synthesized
cacgtacgccagctcccaag

SEQ ID NO: 51194 - DNA, 20 bp, Artificial Sequence
  chemically synthesized
acgtacgccagctcccaagc

SEQ ID NO: 51195 - DNA, 20 bp, Artificial Sequence
  chemically synthesized
ccagctcccaagcaggtttg

SEQ ID NO: 51196 - DNA, 20 bp, Artificial Sequence
  chemically synthesized
cagctcccaagcaggtttgc

SEQ ID NO: 51197 - DNA, 20 bp, Artificial Sequence
  chemically synthesized
aagcaggtttgcgggttgca

SEQ ID NO: 51198 - DNA, 20 bp, Artificial Sequence
  chemically synthesized
caggtttgcgggttgcacag

SEQ ID NO: 51199 - DNA, 20 bp, Artificial Sequence
  chemically synthesized
aggtttgcgggttgcacagc

SEQ ID NO: 51200 - DNA, 20 bp, Artificial Sequence
  chemically synthesized
gcgggcgatgcaatctgatt

SEQ ID NO: 51201 - DNA, 20 bp, Artificial Sequence
  chemically synthesized
cgggcgatgcaatctgattt

SEQ ID NO: 51202 - DNA, 20 bp, Artificial Sequence
  chemically synthesized
caatctgatttaggctttta

SEQ ID NO: 51203 - DNA, 20 bp, Artificial Sequence
  chemically synthesized
aatctgatttaggcttttaa

SEQ ID NO: 51204 - DNA, 20 bp, Artificial Sequence
  chemically synthesized
atctgatttaggcttttaaa

SEQ ID NO: 51205 - DNA, 20 bp, Artificial Sequence
  chemically synthesized
cttttaaagggattgcaatc

SEQ ID NO: 51206 - DNA, 20 bp, Artificial Sequence
  chemically synthesized
ttaaagggattgcaatcaag

SEQ ID NO: 51207 - DNA, 20 bp, Artificial Sequence
  chemically synthesized
taaagggattgcaatcaagt

SEQ ID NO: 51208 - DNA, 20 bp, Artificial Sequence
  chemically synthesized
aaagggattgcaatcaagtg

SEQ ID NO: 51209 - DNA, 20 bp, Artificial Sequence
  chemically synthesized
gcaatcaagtggggccccac

SEQ ID NO: 51210 - DNA, 20 bp, Artificial Sequence
  chemically synthesized
cctcccctcccctccacccc

SEQ ID NO: 51211 - DNA, 20 bp, Artificial Sequence
  chemically synthesized
cccctcccctccacccccag

SEQ ID NO: 51212 - DNA, 20 bp, Artificial Sequence
  chemically synthesized
tccacccccagcagtctcca

SEQ ID NO: 51213 - DNA, 20 bp, Artificial Sequence
  chemically synthesized
ccacccccagcagtctccaa

SEQ ID NO: 51214 - DNA, 20 bp, Artificial Sequence
  chemically synthesized
ccaaaggcctccaacaaccc

SEQ ID NO: 51215 - DNA, 20 bp, Artificial Sequence
  chemically synthesized
aaaggcctccaacaacccca

SEQ ID NO: 51216 - DNA, 20 bp, Artificial Sequence
  chemically synthesized
ggcctccaacaaccccagag

SEQ ID NO: 51217 - DNA, 20 bp, Artificial Sequence
  chemically synthesized
gcctccaacaaccccagagt

SEQ ID NO: 51218 - DNA, 20 bp, Artificial Sequence
  chemically synthesized
cctccaacaaccccagagtg

SEQ ID NO: 51219 - DNA, 20 bp, Artificial Sequence
  chemically synthesized
ctccaacaaccccagagtgg

SEQ ID NO: 51220 - DNA, 20 bp, Artificial Sequence
  chemically synthesized
gagtgggggccatgtatcca

SEQ ID NO: 51221 - DNA, 20 bp, Artificial Sequence
  chemically synthesized
catgtatccaaagaaactcc

SEQ ID NO: 51222 - DNA, 20 bp, Artificial Sequence
  chemically synthesized
aagaaactccaagctgtata

SEQ ID NO: 51223 - DNA, 20 bp, Artificial Sequence
  chemically synthesized
aagctgtatacggatcacac

SEQ ID NO: 51224 - DNA, 20 bp, Artificial Sequence
  chemically synthesized
tacggatcacactggttttc

SEQ ID NO: 51225 - DNA, 20 bp, Artificial Sequence
  chemically synthesized
acggatcacactggttttcc

SEQ ID NO: 51226 - DNA, 20 bp, Artificial Sequence
  chemically synthesized
ggatcacactggttttccag

SEQ ID NO: 51227 - DNA, 20 bp, Artificial Sequence
  chemically synthesized
tggttttccaggagcaaaaa

SEQ ID NO: 51228 - DNA, 20 bp, Artificial Sequence
  chemically synthesized
tccaggagcaaaaacagaaa

SEQ ID NO: 51229 - DNA, 20 bp, Artificial Sequence
  chemically synthesized
ccaggagcaaaaacagaaac

SEQ ID NO: 51230 - DNA, 20 bp, Artificial Sequence
  chemically synthesized
gcaaaaacagaaacaggcct

SEQ ID NO: 51231 - DNA, 20 bp, Artificial Sequence
  chemically synthesized
caaaaacagaaacaggcctg

SEQ ID NO: 51232 - DNA, 20 bp, Artificial Sequence
  chemically synthesized
aacagaaacaggcctgaggc

SEQ ID NO: 51233 - DNA, 20 bp, Artificial Sequence
  chemically synthesized
attgaacctcctcctgctct

SEQ ID NO: 51234 - DNA, 20 bp, Artificial Sequence
  chemically synthesized
gaacctcctcctgctctgag

SEQ ID NO: 51235 - DNA, 20 bp, Artificial Sequence
  chemically synthesized
tcctcctgctctgagcagcc

SEQ ID NO: 51236 - DNA, 20 bp, Artificial Sequence
  chemically synthesized
cctcctgctctgagcagcct

SEQ ID NO: 51237 - DNA, 20 bp, Artificial Sequence
  chemically synthesized
ctcctgctctgagcagcctg

SEQ ID NO: 51238 - DNA, 20 bp, Artificial Sequence
  chemically synthesized
tcctgctctgagcagcctgg

SEQ ID NO: 51239 - DNA, 20 bp, Artificial Sequence
  chemically synthesized
cctgctctgagcagcctggg

SEQ ID NO: 51240 - DNA, 20 bp, Artificial Sequence
  chemically synthesized
gctctgagcagcctgggggg

SEQ ID NO: 51241 - DNA, 20 bp, Artificial Sequence
  chemically synthesized
agcagcctggggggcagact

SEQ ID NO: 51242 - DNA, 20 bp, Artificial Sequence
  chemically synthesized
agcctggggggcagactaag

SEQ ID NO: 51243 - DNA, 20 bp, Artificial Sequence
  chemically synthesized
cctggggggcagactaagca

SEQ ID NO: 51244 - DNA, 20 bp, Artificial Sequence
  chemically synthesized
ctggggggcagactaagcag

SEQ ID NO: 51245 - DNA, 20 bp, Artificial Sequence
  chemically synthesized
tggggggcagactaagcaga

SEQ ID NO: 51246 - DNA, 20 bp, Artificial Sequence
  chemically synthesized
agactaagcagagggctgtg

SEQ ID NO: 51247 - DNA, 20 bp, Artificial Sequence
  chemically synthesized
gggctgtgcagacccacata

SEQ ID NO: 51248 - DNA, 20 bp, Artificial Sequence
  chemically synthesized
gctgtgcagacccacataaa

SEQ ID NO: 51249 - DNA, 20 bp, Artificial Sequence
  chemically synthesized
ataaagagcctactgtgtgc

SEQ ID NO: 51250 - DNA, 20 bp, Artificial Sequence
  chemically synthesized
taaagagcctactgtgtgcc

SEQ ID NO: 51251 - DNA, 20 bp, Artificial Sequence
  chemically synthesized
gtgtgccaggcacttcaccc

SEQ ID NO: 51252 - DNA, 20 bp, Artificial Sequence
  chemically synthesized
tgtgccaggcacttcacccg

SEQ ID NO: 51253 - DNA, 20 bp, Artificial Sequence
  chemically synthesized
cttcacccgaggcacttcac

SEQ ID NO: 51254 - DNA, 20 bp, Artificial Sequence
  chemically synthesized
aggcacttcacaagcatgct

SEQ ID NO: 51255 - DNA, 20 bp, Artificial Sequence
  chemically synthesized
ggcacttcacaagcatgctt

SEQ ID NO: 51256 - DNA, 20 bp, Artificial Sequence
  chemically synthesized
gaatgaaacttccaactctt

SEQ ID NO: 51257 - DNA, 20 bp, Artificial Sequence
  chemically synthesized
aatgaaacttccaactcttt

SEQ ID NO: 51258 - DNA, 20 bp, Artificial Sequence
  chemically synthesized
acttccaactctttgggatg

SEQ ID NO: 51259 - DNA, 20 bp, Artificial Sequence
  chemically synthesized
cttccaactctttgggatgc

SEQ ID NO: 51260 - DNA, 20 bp, Artificial Sequence
  chemically synthesized
tctttgggatgcaggtgaaa

SEQ ID NO: 51261 - DNA, 20 bp, Artificial Sequence
  chemically synthesized
gatgcaggtgaaacagttcc

SEQ ID NO: 51262 - DNA, 20 bp, Artificial Sequence
  chemically synthesized
aggtgaaacagttcctggtt

SEQ ID NO: 51263 - DNA, 20 bp, Artificial Sequence
  chemically synthesized
gtgaaacagttcctggttca

SEQ ID NO: 51264 - DNA, 20 bp, Artificial Sequence
  chemically synthesized
gaaacagttcctggttcaga

SEQ ID NO: 51265 - DNA, 20 bp, Artificial Sequence
  chemically synthesized
aaacagttcctggttcagag

SEQ ID NO: 51266 - DNA, 20 bp, Artificial Sequence
  chemically synthesized
gttcctggttcagagaggtg

SEQ ID NO: 51267 - DNA, 20 bp, Artificial Sequence
  chemically synthesized
cctggttcagagaggtgaag

SEQ ID NO: 51268 - DNA, 20 bp, Artificial Sequence
  chemically synthesized
agaggtgaagcggcctgcct

SEQ ID NO: 51269 - DNA, 20 bp, Artificial Sequence
  chemically synthesized
gaggtgaagcggcctgcctg

SEQ ID NO: 51270 - DNA, 20 bp, Artificial Sequence
  chemically synthesized
gtgaagcggcctgcctgagg

SEQ ID NO: 51271 - DNA, 20 bp, Artificial Sequence
  chemically synthesized
gcggcctgcctgaggcagca

SEQ ID NO: 51272 - DNA, 20 bp, Artificial Sequence
  chemically synthesized
ggcagcacagctcttcttta

SEQ ID NO: 51273 - DNA, 20 bp, Artificial Sequence
  chemically synthesized
cccacctctaccctgtctca

SEQ ID NO: 51274 - DNA, 20 bp, Artificial Sequence
  chemically synthesized
tgtctcacggccccccatgc

SEQ ID NO: 51275 - DNA, 20 bp, Artificial Sequence
  chemically synthesized
ggccccccatgccagcctga

SEQ ID NO: 51276 - DNA, 20 bp, Artificial Sequence
  chemically synthesized
cctgacggttgtgtctgcct

SEQ ID NO: 51277 - DNA, 20 bp, Artificial Sequence
  chemically synthesized
gtcatgctccatttttccat

SEQ ID NO: 51278 - DNA, 20 bp, Artificial Sequence
  chemically synthesized
tcatgctccatttttccatc

SEQ ID NO: 51279 - DNA, 20 bp, Artificial Sequence
  chemically synthesized
atttttccatcgggaccatc

SEQ ID NO: 51280 - DNA, 20 bp, Artificial Sequence
  chemically synthesized
ttttccatcgggaccatcaa

SEQ ID NO: 51281 - DNA, 20 bp, Artificial Sequence
  chemically synthesized
tttccatcgggaccatcaag

SEQ ID NO: 51282 - DNA, 20 bp, Artificial Sequence
  chemically synthesized
ttccatcgggaccatcaaga

SEQ ID NO: 51283 - DNA, 20 bp, Artificial Sequence
  chemically synthesized
tcaagagggtgtttgtgtct

SEQ ID NO: 51284 - DNA, 20 bp, Artificial Sequence
  chemically synthesized
caagagggtgtttgtgtcta

SEQ ID NO: 51285 - DNA, 20 bp, Artificial Sequence
  chemically synthesized
tgtttgtgtctaaggctgac

SEQ ID NO: 51286 - DNA, 20 bp, Artificial Sequence
  chemically synthesized
gtttgtgtctaaggctgact

SEQ ID NO: 51287 - DNA, 20 bp, Artificial Sequence
  chemically synthesized
taaggctgactgggtaactt

SEQ ID NO: 51288 - DNA, 20 bp, Artificial Sequence
  chemically synthesized
ctgactgggtaactttggat

SEQ ID NO: 51289 - DNA, 20 bp, Artificial Sequence
  chemically synthesized
actgggtaactttggatgag

SEQ ID NO: 51290 - DNA, 20 bp, Artificial Sequence
  chemically synthesized
atgagcggtctctccgctct

SEQ ID NO: 51291 - DNA, 20 bp, Artificial Sequence
  chemically synthesized
ctgtttcctcatctgtcaaa

SEQ ID NO: 51292 - DNA, 20 bp, Artificial Sequence
  chemically synthesized
tgtttcctcatctgtcaaat

SEQ ID NO: 51293 - DNA, 20 bp, Artificial Sequence
  chemically synthesized
tctaacccactctgatctcc

SEQ ID NO: 51294 - DNA, 20 bp, Artificial Sequence
  chemically synthesized
ctaacccactctgatctccc

SEQ ID NO: 51295 - DNA, 20 bp, Artificial Sequence
  chemically synthesized
taacccactctgatctccca

SEQ ID NO: 51296 - DNA, 20 bp, Artificial Sequence
  chemically synthesized
cccactctgatctcccaggg

SEQ ID NO: 51297 - DNA, 20 bp, Artificial Sequence
  chemically synthesized
actctgatctcccagggcgg

SEQ ID NO: 51298 - DNA, 20 bp, Artificial Sequence
  chemically synthesized
tgatctcccagggcggcagt

SEQ ID NO: 51299 - DNA, 20 bp, Artificial Sequence
  chemically synthesized
ccagggcggcagtaagtctt

SEQ ID NO: 51300 - DNA, 20 bp, Artificial Sequence
  chemically synthesized
cggcagtaagtcttcagcat

SEQ ID NO: 51301 - DNA, 20 bp, Artificial Sequence
  chemically synthesized
ggcagtaagtcttcagcatc

SEQ ID NO: 51302 - DNA, 20 bp, Artificial Sequence
  chemically synthesized
gtcttcagcatcaggcattt

SEQ ID NO: 51303 - DNA, 20 bp, Artificial Sequence
  chemically synthesized
tcttcagcatcaggcatttt

SEQ ID NO: 51304 - DNA, 20 bp, Artificial Sequence
  chemically synthesized
cttcagcatcaggcattttg

SEQ ID NO: 51305 - DNA, 20 bp, Artificial Sequence
  chemically synthesized
tcaggcattttggggtgact

SEQ ID NO: 51306 - DNA, 20 bp, Artificial Sequence
  chemically synthesized
ttttggggtgactcagtaaa

SEQ ID NO: 51307 - DNA, 20 bp, Artificial Sequence
  chemically synthesized
tggggtgactcagtaaatgg

SEQ ID NO: 51308 - DNA, 20 bp, Artificial Sequence
  chemically synthesized
taaatggtagatcttgctac

SEQ ID NO: 51309 - DNA, 20 bp, Artificial Sequence
  chemically synthesized
atggtagatcttgctaccag

SEQ ID NO: 51310 - DNA, 20 bp, Artificial Sequence
  chemically synthesized
agatcttgctaccagtggaa

SEQ ID NO: 51311 - DNA, 20 bp, Artificial Sequence
  chemically synthesized
ctaccagtggaacagccact

SEQ ID NO: 51312 - DNA, 20 bp, Artificial Sequence
  chemically synthesized
taccagtggaacagccacta

SEQ ID NO: 51313 - DNA, 20 bp, Artificial Sequence
  chemically synthesized
aacagccactaaggattctg

SEQ ID NO: 51314 - DNA, 20 bp, Artificial Sequence
  chemically synthesized
gccactaaggattctgcagt

SEQ ID NO: 51315 - DNA, 20 bp, Artificial Sequence
  chemically synthesized
cactaaggattctgcagtga

SEQ ID NO: 51316 - DNA, 20 bp, Artificial Sequence
  chemically synthesized
taaggattctgcagtgagag

SEQ ID NO: 51317 - DNA, 20 bp, Artificial Sequence
  chemically synthesized
aggattctgcagtgagagca

SEQ ID NO: 51318 - DNA, 20 bp, Artificial Sequence
  chemically synthesized
ggattctgcagtgagagcag

SEQ ID NO: 51319 - DNA, 20 bp, Artificial Sequence
  chemically synthesized
gattctgcagtgagagcaga

SEQ ID NO: 51320 - DNA, 20 bp, Artificial Sequence
  chemically synthesized
ctgcagtgagagcagagggc

SEQ ID NO: 51321 - DNA, 20 bp, Artificial Sequence
  chemically synthesized
gtgagagcagagggccagct

SEQ ID NO: 51322 - DNA, 20 bp, Artificial Sequence
  chemically synthesized
agagcagagggccagctaag

SEQ ID NO: 51323 - DNA, 20 bp, Artificial Sequence
  chemically synthesized
ccagctaagtggtactctcc

SEQ ID NO: 51324 - DNA, 20 bp, Artificial Sequence
  chemically synthesized
agctaagtggtactctccca

SEQ ID NO: 51325 - DNA, 20 bp, Artificial Sequence
  chemically synthesized
tcacgccaccccctccacct

SEQ ID NO: 51326 - DNA, 20 bp, Artificial Sequence
  chemically synthesized
caccccctccaccttggaca

SEQ ID NO: 51327 - DNA, 20 bp, Artificial Sequence
  chemically synthesized
accccctccaccttggacac

SEQ ID NO: 51328 - DNA, 20 bp, Artificial Sequence
  chemically synthesized
accttggacacaggacgctg

SEQ ID NO: 51329 - DNA, 20 bp, Artificial Sequence
  chemically synthesized
cacaggacgctgtggtttct

SEQ ID NO: 51330 - DNA, 20 bp, Artificial Sequence
  chemically synthesized
ggacgctgtggtttctgagc

SEQ ID NO: 51331 - DNA, 20 bp, Artificial Sequence
  chemically synthesized
gacgctgtggtttctgagcc

SEQ ID NO: 51332 - DNA, 20 bp, Artificial Sequence
  chemically synthesized
ccaggtacaatgactccttt

SEQ ID NO: 51333 - DNA, 20 bp, Artificial Sequence
  chemically synthesized
gtacaatgactcctttcggt

SEQ ID NO: 51334 - DNA, 20 bp, Artificial Sequence
  chemically synthesized
atgactcctttcggtaagtg

SEQ ID NO: 51335 - DNA, 20 bp, Artificial Sequence
  chemically synthesized
actcctttcggtaagtgcag

SEQ ID NO: 51336 - DNA, 20 bp, Artificial Sequence
  chemically synthesized
cctttcggtaagtgcagtgg

SEQ ID NO: 51337 - DNA, 20 bp, Artificial Sequence
  chemically synthesized
agtggaagctgtacactgcc

SEQ ID NO: 51338 - DNA, 20 bp, Artificial Sequence
  chemically synthesized
gtggaagctgtacactgccc

SEQ ID NO: 51339 - DNA, 20 bp, Artificial Sequence
  chemically synthesized
agctgtacactgcccaggca

SEQ ID NO: 51340 - DNA, 20 bp, Artificial Sequence
  chemically synthesized
cactgcccaggcaaagcgtc

SEQ ID NO: 51341 - DNA, 20 bp, Artificial Sequence
  chemically synthesized
actgcccaggcaaagcgtcc

SEQ ID NO: 51342 - DNA, 20 bp, Artificial Sequence
  chemically synthesized
gcccaggcaaagcgtccggg

SEQ ID NO: 51343 - DNA, 20 bp, Artificial Sequence
  chemically synthesized
ggcaaagcgtccgggcagcg

SEQ ID NO: 51344 - DNA, 20 bp, Artificial Sequence
  chemically synthesized
gcaaagcgtccgggcagcgt

SEQ ID NO: 51345 - DNA, 20 bp, Artificial Sequence
  chemically synthesized
aagcgtccgggcagcgtagg

SEQ ID NO: 51346 - DNA, 20 bp, Artificial Sequence
  chemically synthesized
agcgtccgggcagcgtaggc

SEQ ID NO: 51347 - DNA, 20 bp, Artificial Sequence
  chemically synthesized
ggcagcgtaggcgggcgact

SEQ ID NO: 51348 - DNA, 20 bp, Artificial Sequence
  chemically synthesized
taggcgggcgactcagatcc

SEQ ID NO: 51349 - DNA, 20 bp, Artificial Sequence
  chemically synthesized
cgggcgactcagatcccagc

SEQ ID NO: 51350 - DNA, 20 bp, Artificial Sequence
  chemically synthesized
gcgactcagatcccagccag

SEQ ID NO: 51351 - DNA, 20 bp, Artificial Sequence
  chemically synthesized
cagatcccagccagtggact

SEQ ID NO: 51352 - DNA, 20 bp, Artificial Sequence
  chemically synthesized
ctgtttgctcctccgataac

SEQ ID NO: 51353 - DNA, 20 bp, Artificial Sequence
  chemically synthesized
tgtttgctcctccgataact

SEQ ID NO: 51354 - DNA, 20 bp, Artificial Sequence
  chemically synthesized
gtttgctcctccgataactg

SEQ ID NO: 51355 - DNA, 20 bp, Artificial Sequence
  chemically synthesized
tccgataactggggtgacct

SEQ ID NO: 51356 - DNA, 20 bp, Artificial Sequence
  chemically synthesized
tgaccttggttaatattcac

SEQ ID NO: 51357 - DNA, 20 bp, Artificial Sequence
  chemically synthesized
ccttggttaatattcaccag

SEQ ID NO: 51358 - DNA, 20 bp, Artificial Sequence
  chemically synthesized
agcctcccccgttgcccctc

SEQ ID NO: 51359 - DNA, 20 bp, Artificial Sequence
  chemically synthesized
ctggatccactgcttaaata

SEQ ID NO: 51360 - DNA, 20 bp, Artificial Sequence
  chemically synthesized
tccactgcttaaatacggac

SEQ ID NO: 51361 - DNA, 20 bp, Artificial Sequence
  chemically synthesized
ccactgcttaaatacggacg

SEQ ID NO: 51362 - DNA, 20 bp, Artificial Sequence
  chemically synthesized
tgcttaaatacggacgagga

SEQ ID NO: 51363 - DNA, 20 bp, Artificial Sequence
  chemically synthesized
gcttaaatacggacgaggac

SEQ ID NO: 51364 - DNA, 20 bp, Artificial Sequence
  chemically synthesized
cttaaatacggacgaggaca

SEQ ID NO: 51365 - DNA, 20 bp, Artificial Sequence
  chemically synthesized
aggacagggccctgtctcct

SEQ ID NO: 51366 - DNA, 20 bp, Artificial Sequence
  chemically synthesized
gggccctgtctcctcagctt

SEQ ID NO: 51367 - DNA, 20 bp, Artificial Sequence
  chemically synthesized
ggccctgtctcctcagcttc

SEQ ID NO: 51368 - DNA, 20 bp, Artificial Sequence
  chemically synthesized
ttcaggcaccaccactgacc

SEQ ID NO: 51369 - DNA, 20 bp, Artificial Sequence
  chemically synthesized
tcaggcaccaccactgacct

SEQ ID NO: 51370 - DNA, 20 bp, Artificial Sequence
  chemically synthesized
gcaccaccactgacctggga

SEQ ID NO: 51371 - DNA, 20 bp, Artificial Sequence
  chemically synthesized
gacctgggacagtgaatcgt

SEQ ID NO: 51372 - DNA, 20 bp, Artificial Sequence
  chemically synthesized
gtaagtatgcctttcactgc

SEQ ID NO: 51373 - DNA, 20 bp, Artificial Sequence
  chemically synthesized
aagtatgcctttcactgcga

SEQ ID NO: 51374 - DNA, 20 bp, Artificial Sequence
  chemically synthesized
agtatgcctttcactgcgag

SEQ ID NO: 51375 - DNA, 20 bp, Artificial Sequence
  chemically synthesized
cctttcactgcgagaggttc

SEQ ID NO: 51376 - DNA, 20 bp, Artificial Sequence
  chemically synthesized
tttcactgcgagaggttctg

SEQ ID NO: 51377 - DNA, 20 bp, Artificial Sequence
  chemically synthesized
tcactgcgagaggttctgga

SEQ ID NO: 51378 - DNA, 20 bp, Artificial Sequence
  chemically synthesized
cactgcgagaggttctggag

SEQ ID NO: 51379 - DNA, 20 bp, Artificial Sequence
  chemically synthesized
gaggttctggagaggcttct

SEQ ID NO: 51380 - DNA, 20 bp, Artificial Sequence
  chemically synthesized
agaggcttctgagctcccca

SEQ ID NO: 51381 - DNA, 20 bp, Artificial Sequence
  chemically synthesized
cttctgagctccccatggcc

SEQ ID NO: 51382 - DNA, 20 bp, Artificial Sequence
  chemically synthesized
ttctgagctccccatggccc

SEQ ID NO: 51383 - DNA, 20 bp, Artificial Sequence
  chemically synthesized
tgagctccccatggcccagg

SEQ ID NO: 51384 - DNA, 20 bp, Artificial Sequence
  chemically synthesized
gagctccccatggcccaggc

SEQ ID NO: 51385 - DNA, 20 bp, Artificial Sequence
  chemically synthesized
ctccccatggcccaggcagg

SEQ ID NO: 51386 - DNA, 20 bp, Artificial Sequence
  chemically synthesized
cccatggcccaggcaggcag

SEQ ID NO: 51387 - DNA, 20 bp, Artificial Sequence
  chemically synthesized
ccatggcccaggcaggcagc

SEQ ID NO: 51388 - DNA, 20 bp, Artificial Sequence
  chemically synthesized
gcccaggcaggcagcaggtc

SEQ ID NO: 51389 - DNA, 20 bp, Artificial Sequence
  chemically synthesized
cccaggcaggcagcaggtct

SEQ ID NO: 51390 - DNA, 20 bp, Artificial Sequence
  chemically synthesized
ccaggcaggcagcaggtctg

SEQ ID NO: 51391 - DNA, 20 bp, Artificial Sequence
  chemically synthesized
ggcaggcagcaggtctgggg

SEQ ID NO: 51392 - DNA, 20 bp, Artificial Sequence
  chemically synthesized
gcaggcagcaggtctggggc

SEQ ID NO: 51393 - DNA, 20 bp, Artificial Sequence
  chemically synthesized
aggcagcaggtctggggcag

SEQ ID NO: 51394 - DNA, 20 bp, Artificial Sequence
  chemically synthesized
ggcagcaggtctggggcagg

SEQ ID NO: 51395 - DNA, 20 bp, Artificial Sequence
  chemically synthesized
gcagcaggtctggggcagga

SEQ ID NO: 51396 - DNA, 20 bp, Artificial Sequence
  chemically synthesized
cagcaggtctggggcaggag

SEQ ID NO: 51397 - DNA, 20 bp, Artificial Sequence
  chemically synthesized
agcaggtctggggcaggagg

SEQ ID NO: 51398 - DNA, 20 bp, Artificial Sequence
  chemically synthesized
gcaggtctggggcaggaggg

SEQ ID NO: 51399 - DNA, 20 bp, Artificial Sequence
  chemically synthesized
ctggggcaggaggggggttg

SEQ ID NO: 51400 - DNA, 20 bp, Artificial Sequence
  chemically synthesized
ggggcaggaggggggttgtg

SEQ ID NO: 51401 - DNA, 20 bp, Artificial Sequence
  chemically synthesized
gcaggaggggggttgtggag

SEQ ID NO: 51402 - DNA, 20 bp, Artificial Sequence
  chemically synthesized
caggaggggggttgtggagt

SEQ ID NO: 51403 - DNA, 20 bp, Artificial Sequence
  chemically synthesized
ggagtgggtatccgcctgct

SEQ ID NO: 51404 - DNA, 20 bp, Artificial Sequence
  chemically synthesized
gagtgggtatccgcctgctg

SEQ ID NO: 51405 - DNA, 20 bp, Artificial Sequence
  chemically synthesized
ggtatccgcctgctgaggtg

SEQ ID NO: 51406 - DNA, 20 bp, Artificial Sequence
  chemically synthesized
gtatccgcctgctgaggtgc

SEQ ID NO: 51407 - DNA, 20 bp, Artificial Sequence
  chemically synthesized
tatccgcctgctgaggtgca

SEQ ID NO: 51408 - DNA, 20 bp, Artificial Sequence
  chemically synthesized
ccgcctgctgaggtgcaggg

SEQ ID NO: 51409 - DNA, 20 bp, Artificial Sequence
  chemically synthesized
ctgctgaggtgcagggcaga

SEQ ID NO: 51410 - DNA, 20 bp, Artificial Sequence
  chemically synthesized
gctgaggtgcagggcagatg

SEQ ID NO: 51411 - DNA, 20 bp, Artificial Sequence
  chemically synthesized
tgaggtgcagggcagatgga

SEQ ID NO: 51412 - DNA, 20 bp, Artificial Sequence
  chemically synthesized
gaggtgcagggcagatggag

SEQ ID NO: 51413 - DNA, 20 bp, Artificial Sequence
  chemically synthesized
cagggcagatggagaggctg

SEQ ID NO: 51414 - DNA, 20 bp, Artificial Sequence
  chemically synthesized
cagatggagaggctgcagct

SEQ ID NO: 51415 - DNA, 20 bp, Artificial Sequence
  chemically synthesized
agctcctattttcataataa

SEQ ID NO: 51416 - DNA, 20 bp, Artificial Sequence
  chemically synthesized
tcctattttcataataacag

SEQ ID NO: 51417 - DNA, 20 bp, Artificial Sequence
  chemically synthesized
ttcataataacagcagccat

SEQ ID NO: 51418 - DNA, 20 bp, Artificial Sequence
  chemically synthesized
tcataataacagcagccatg

SEQ ID NO: 51419 - DNA, 20 bp, Artificial Sequence
  chemically synthesized
cataataacagcagccatga

SEQ ID NO: 51420 - DNA, 20 bp, Artificial Sequence
  chemically synthesized
gagggttgtgtcctgtttcc

SEQ ID NO: 51421 - DNA, 20 bp, Artificial Sequence
  chemically synthesized
tcctgtttcccagtcctgcc

SEQ ID NO: 51422 - DNA, 20 bp, Artificial Sequence
  chemically synthesized
agtcctgcccggtcccccct

SEQ ID NO: 51423 - DNA, 20 bp, Artificial Sequence
  chemically synthesized
ggtcccccctcggtacctcc

SEQ ID NO: 51424 - DNA, 20 bp, Artificial Sequence
  chemically synthesized
cccccctcggtacctcctgg

SEQ ID NO: 51425 - DNA, 20 bp, Artificial Sequence
  chemically synthesized
gtacctcctggtggatacac

SEQ ID NO: 51426 - DNA, 20 bp, Artificial Sequence
  chemically synthesized
gtggatacactggttcctgt

SEQ ID NO: 51427 - DNA, 20 bp, Artificial Sequence
  chemically synthesized
gatacactggttcctgtaag

SEQ ID NO: 51428 - DNA, 20 bp, Artificial Sequence
  chemically synthesized
acactggttcctgtaagcag

SEQ ID NO: 51429 - DNA, 20 bp, Artificial Sequence
  chemically synthesized
ctggttcctgtaagcagaag

SEQ ID NO: 51430 - DNA, 20 bp, Artificial Sequence
  chemically synthesized
tcctgtaagcagaagtggat

SEQ ID NO: 51431 - DNA, 20 bp, Artificial Sequence
  chemically synthesized
cctgtaagcagaagtggatg

SEQ ID NO: 51432 - DNA, 20 bp, Artificial Sequence
  chemically synthesized
ctgtaagcagaagtggatga

SEQ ID NO: 51433 - DNA, 20 bp, Artificial Sequence
  chemically synthesized
cagaagtggatgagggtgtc

SEQ ID NO: 51434 - DNA, 20 bp, Artificial Sequence
  chemically synthesized
agaagtggatgagggtgtct

SEQ ID NO: 51435 - DNA, 20 bp, Artificial Sequence
  chemically synthesized
gatgagggtgtctaggtctg

SEQ ID NO: 51436 - DNA, 20 bp, Artificial Sequence
  chemically synthesized
ggtgtctaggtctgcagtcc

SEQ ID NO: 51437 - DNA, 20 bp, Artificial Sequence
  chemically synthesized
ggtctgcagtcctggcaccc

SEQ ID NO: 51438 - DNA, 20 bp, Artificial Sequence
  chemically synthesized
gtctgcagtcctggcacccc

SEQ ID NO: 51439 - DNA, 20 bp, Artificial Sequence
  chemically synthesized
gcagtcctggcaccccagga

SEQ ID NO: 51440 - DNA, 20 bp, Artificial Sequence
  chemically synthesized
cagtcctggcaccccaggat

SEQ ID NO: 51441 - DNA, 20 bp, Artificial Sequence
  chemically synthesized
agtcctggcaccccaggatg

SEQ ID NO: 51442 - DNA, 20 bp, Artificial Sequence
  chemically synthesized
gtcctggcaccccaggatgg

SEQ ID NO: 51443 - DNA, 20 bp, Artificial Sequence
  chemically synthesized
caccccaggatgggggacac

SEQ ID NO: 51444 - DNA, 20 bp, Artificial Sequence
  chemically synthesized
caggatgggggacaccagcc

SEQ ID NO: 51445 - DNA, 20 bp, Artificial Sequence
  chemically synthesized
gggggacaccagccaagata

SEQ ID NO: 51446 - DNA, 20 bp, Artificial Sequence
  chemically synthesized
caccagccaagatacagcaa

SEQ ID NO: 51447 - DNA, 20 bp, Artificial Sequence
  chemically synthesized
aagatacagcaacagcaaca

SEQ ID NO: 51448 - DNA, 20 bp, Artificial Sequence
  chemically synthesized
acagcaacagcaacaaagcg

SEQ ID NO: 51449 - DNA, 20 bp, Artificial Sequence
  chemically synthesized
gccatttctttctgtttgca

SEQ ID NO: 51450 - DNA, 20 bp, Artificial Sequence
  chemically synthesized
tgcacagctcctctgtctgt

SEQ ID NO: 51451 - DNA, 20 bp, Artificial Sequence
  chemically synthesized
gcacagctcctctgtctgtc

SEQ ID NO: 51452 - DNA, 20 bp, Artificial Sequence
  chemically synthesized
cacagctcctctgtctgtcg

SEQ ID NO: 51453 - DNA, 20 bp, Artificial Sequence
  chemically synthesized
acagctcctctgtctgtcgg

SEQ ID NO: 51454 - DNA, 20 bp, Artificial Sequence
  chemically synthesized
tcctgtctgttgtctcctat

SEQ ID NO: 51455 - DNA, 20 bp, Artificial Sequence
  chemically synthesized
tcaccacctctcctactgct

SEQ ID NO: 51456 - DNA, 20 bp, Artificial Sequence
  chemically synthesized
caccacctctcctactgctt

SEQ ID NO: 51457 - DNA, 20 bp, Artificial Sequence
  chemically synthesized
tgcatctttctccccttcta

SEQ ID NO: 51458 - DNA, 20 bp, Artificial Sequence
  chemically synthesized
ctttctccccttctatagat

SEQ ID NO: 51459 - DNA, 20 bp, Artificial Sequence
  chemically synthesized
tttctccccttctatagatg

SEQ ID NO: 51460 - DNA, 20 bp, Artificial Sequence
  chemically synthesized
tctccccttctatagatgag

SEQ ID NO: 51461 - DNA, 20 bp, Artificial Sequence
  chemically synthesized
ctccccttctatagatgagg

SEQ ID NO: 51462 - DNA, 20 bp, Artificial Sequence
  chemically synthesized
cttctatagatgaggaggtt

SEQ ID NO: 51463 - DNA, 20 bp, Artificial Sequence
  chemically synthesized
ttctatagatgaggaggtta

SEQ ID NO: 51464 - DNA, 20 bp, Artificial Sequence
  chemically synthesized
tagatgaggaggttaaggtc

SEQ ID NO: 51465 - DNA, 20 bp, Artificial Sequence
  chemically synthesized
gatgaggaggttaaggtcca

SEQ ID NO: 51466 - DNA, 20 bp, Artificial Sequence
  chemically synthesized
tgaggaggttaaggtccaga

SEQ ID NO: 51467 - DNA, 20 bp, Artificial Sequence
  chemically synthesized
gaggaggttaaggtccagag

SEQ ID NO: 51468 - DNA, 20 bp, Artificial Sequence
  chemically synthesized
aggaggttaaggtccagaga

SEQ ID NO: 51469 - DNA, 20 bp, Artificial Sequence
  chemically synthesized
ggaggttaaggtccagagag

SEQ ID NO: 51470 - DNA, 20 bp, Artificial Sequence
  chemically synthesized
ggttaaggtccagagagggg

SEQ ID NO: 51471 - DNA, 20 bp, Artificial Sequence
  chemically synthesized
gttaaggtccagagaggggt

SEQ ID NO: 51472 - DNA, 20 bp, Artificial Sequence
  chemically synthesized
ttaaggtccagagaggggtg

SEQ ID NO: 51473 - DNA, 20 bp, Artificial Sequence
  chemically synthesized
aaggtccagagaggggtggg

SEQ ID NO: 51474 - DNA, 20 bp, Artificial Sequence
  chemically synthesized
aggtccagagaggggtgggg

SEQ ID NO: 51475 - DNA, 20 bp, Artificial Sequence
  chemically synthesized
agaggggtggggaggaacgc

SEQ ID NO: 51476 - DNA, 20 bp, Artificial Sequence
  chemically synthesized
ctcacattctccatcccctc

SEQ ID NO: 51477 - DNA, 20 bp, Artificial Sequence
  chemically synthesized
ccatcccctccagatatgac

SEQ ID NO: 51478 - DNA, 20 bp, Artificial Sequence
  chemically synthesized
catcccctccagatatgacc

SEQ ID NO: 51479 - DNA, 20 bp, Artificial Sequence
  chemically synthesized
cctccagatatgaccaggaa

SEQ ID NO: 51480 - DNA, 20 bp, Artificial Sequence
  chemically synthesized
gaccaggaacagacctgtgc

SEQ ID NO: 51481 - DNA, 20 bp, Artificial Sequence
  chemically synthesized
accaggaacagacctgtgcc

SEQ ID NO: 51482 - DNA, 20 bp, Artificial Sequence
  chemically synthesized
aacagacctgtgccaggcct

SEQ ID NO: 51483 - DNA, 20 bp, Artificial Sequence
  chemically synthesized
tgttcctggtcatatctgga

SEQ ID NO: 51484 - DNA, 20 bp, Artificial Sequence
  chemically synthesized
ggtcatatctggaggggatg

SEQ ID NO: 51485 - DNA, 20 bp, Artificial Sequence
  chemically synthesized
ttggctggtgtcccccatcc

SEQ ID NO: 51486 - DNA, 20 bp, Artificial Sequence
  chemically synthesized
tctgccctgcacctcagcag

SEQ ID NO: 51487 - DNA, 20 bp, Artificial Sequence
  chemically synthesized
tcctcgtccgtatttaagca

SEQ ID NO: 51488 - DNA, 20 bp, Artificial Sequence
  chemically synthesized
ggcaacgggggaggctgctg

SEQ ID NO: 51489 - DNA, 20 bp, Artificial Sequence
  chemically synthesized
caggggctaagtccactggc

SEQ ID NO: 51490 - DNA, 20 bp, Artificial Sequence
  chemically synthesized
ctaagtccactggctgggat

SEQ ID NO: 51491 - DNA, 20 bp, Artificial Sequence
  chemically synthesized
cttccactgcacttaccgaa

SEQ ID NO: 51492 - DNA, 20 bp, Artificial Sequence
  chemically synthesized
cgtcctgtgtccaaggtgga

SEQ ID NO: 51493 - DNA, 20 bp, Artificial Sequence
  chemically synthesized
tccaaggtggagggggtggc

SEQ ID NO: 51494 - DNA, 20 bp, Artificial Sequence
  chemically synthesized
gtgagtcagacagtctctgg

SEQ ID NO: 51495 - DNA, 20 bp, Artificial Sequence
  chemically synthesized
ctggccctctgctctcactg

SEQ ID NO: 51496 - DNA, 20 bp, Artificial Sequence
  chemically synthesized
gtagcaagatctaccattta

SEQ ID NO: 51497 - DNA, 20 bp, Artificial Sequence
  chemically synthesized
ttactgccgccctgggagat

SEQ ID NO: 51498 - DNA, 20 bp, Artificial Sequence
  chemically synthesized
tgccgccctgggagatcaga

SEQ ID NO: 51499 - DNA, 20 bp, Artificial Sequence
  chemically synthesized
tggcatggggggccgtgaga

SEQ ID NO: 51500 - DNA, 20 bp, Artificial Sequence
  chemically synthesized
actgtttcacctgcatccca

SEQ ID NO: 51501 - DNA, 20 bp, Artificial Sequence
  chemically synthesized
aagcatgcttgtgaagtgcc

SEQ ID NO: 51502 - DNA, 20 bp, Artificial Sequence
  chemically synthesized
gcacacagtaggctctttat

SEQ ID NO: 51503 - DNA, 20 bp, Artificial Sequence
  chemically synthesized
agtgtgatccgtatacagct

SEQ ID NO: 51504 - DNA, 20 bp, Artificial Sequence
  chemically synthesized
gtatacagcttggagtttct

SEQ ID NO: 51505 - DNA, 20 bp, Artificial Sequence
  chemically synthesized
tggatacatggcccccactc

SEQ ID NO: 51506 - DNA, 20 bp, Artificial Sequence
  chemically synthesized
ggaggcctttggagactgct

SEQ ID NO: 51507 - DNA, 20 bp, Artificial Sequence
  chemically synthesized
ggtggaggggaggggaggta

SEQ ID NO: 51508 - DNA, 20 bp, Artificial Sequence
  chemically synthesized
gtacgtgccgtagatacttg

SEQ ID NO: 51509 - DNA, 20 bp, Artificial Sequence
  chemically synthesized
gtgccgtagatacttgcaga

SEQ ID NO: 51510 - DNA, 20 bp, Artificial Sequence
  chemically synthesized
cgtagatacttgcagagtga

SEQ ID NO: 51511 - DNA, 20 bp, Artificial Sequence
  chemically synthesized
gatacttgcagagtgaatgg

SEQ ID NO: 51512 - DNA, 20 bp, Artificial Sequence
  chemically synthesized
ccaccttggggctctaccag

SEQ ID NO: 51513 - DNA, 20 bp, Artificial Sequence
  chemically synthesized
tctaccaggcgagtgaccca

SEQ ID NO: 51514 - DNA, 20 bp, Artificial Sequence
  chemically synthesized
tactggctgtgaggcctcag

SEQ ID NO: 51515 - DNA, 20 bp, Artificial Sequence
  chemically synthesized
aatttccctatctgtaaaat

SEQ ID NO: 51516 - DNA, 20 bp, Artificial Sequence
  chemically synthesized
gtaccttgttgagctgctgt

SEQ ID NO: 51517 - DNA, 20 bp, Artificial Sequence
  chemically synthesized
agttcaaggaaagctcagag

SEQ ID NO: 51518 - DNA, 20 bp, Artificial Sequence
  chemically synthesized
ggaaagctcagagacgggta

SEQ ID NO: 51519 - DNA, 20 bp, Artificial Sequence
  chemically synthesized
gtgtcaggggctggtgtcac

SEQ ID NO: 51520 - DNA, 20 bp, Artificial Sequence
  chemically synthesized
aggggctggtgtcactgggg

SEQ ID NO: 51521 - DNA, 20 bp, Artificial Sequence
  chemically synthesized
tcattcagttaccctgtgaa

SEQ ID NO: 51522 - DNA, 20 bp, Artificial Sequence
  chemically synthesized
ctgtccttcccctgagctgg

SEQ ID NO: 51523 - DNA, 20 bp, Artificial Sequence
  chemically synthesized
ccttcccctgagctggctga

SEQ ID NO: 51524 - DNA, 20 bp, Artificial Sequence
  chemically synthesized
tgtccctcccacctgtggaa

SEQ ID NO: 51525 - DNA, 20 bp, Artificial Sequence
  chemically synthesized
gtctcttctggcaggcacag

SEQ ID NO: 51526 - DNA, 20 bp, Artificial Sequence
  chemically synthesized
aggttgccgcccctccaacc

SEQ ID NO: 51527 - DNA, 20 bp, Artificial Sequence
  chemically synthesized
ttggttcagctcaggactct

SEQ ID NO: 51528 - DNA, 20 bp, Artificial Sequence
  chemically synthesized
gcccacccaggaagtagact

SEQ ID NO: 51529 - DNA, 20 bp, Artificial Sequence
  chemically synthesized
ggacaagtcaccctctccct

SEQ ID NO: 51530 - DNA, 20 bp, Artificial Sequence
  chemically synthesized
aggtacagtcacactgccca

SEQ ID NO: 51531 - DNA, 20 bp, Artificial Sequence
  chemically synthesized
cttgcggcaactcaaaggga

SEQ ID NO: 51532 - DNA, 20 bp, Artificial Sequence
  chemically synthesized
aagggagagggtgacttgtc

SEQ ID NO: 51533 - DNA, 20 bp, Artificial Sequence
  chemically synthesized
caggtgacatgccgggctgt

SEQ ID NO: 51534 - DNA, 20 bp, Artificial Sequence
  chemically synthesized
ctccacccgaagtctacttc

SEQ ID NO: 51535 - DNA, 20 bp, Artificial Sequence
  chemically synthesized
tgcctccacgcagcaaccct

SEQ ID NO: 51536 - DNA, 20 bp, Artificial Sequence
  chemically synthesized
agctgaaccaagaaggagga

SEQ ID NO: 51537 - DNA, 20 bp, Artificial Sequence
  chemically synthesized
gcctagccgctgctgctgcc

SEQ ID NO: 51538 - DNA, 20 bp, Artificial Sequence
  chemically synthesized
gtgggagggacagcagggct

SEQ ID NO: 51539 - DNA, 20 bp, Artificial Sequence
  chemically synthesized
gggacagcagggcttagagt

SEQ ID NO: 51540 - DNA, 20 bp, Artificial Sequence
  chemically synthesized
cacagcccagtgctggagct

SEQ ID NO: 51541 - DNA, 20 bp, Artificial Sequence
  chemically synthesized
gcccagtgctggagctgtga

SEQ ID NO: 51542 - DNA, 20 bp, Artificial Sequence
  chemically synthesized
tgtgagtggatgtagagcag

SEQ ID NO: 51543 - DNA, 20 bp, Artificial Sequence
  chemically synthesized
ggacaggggccctgaagcca

SEQ ID NO: 51544 - DNA, 20 bp, Artificial Sequence
  chemically synthesized
gagctcagagagaaggggag

SEQ ID NO: 51545 - DNA, 20 bp, Artificial Sequence
  chemically synthesized
agtttcccgctgcctgaaag

SEQ ID NO: 51546 - DNA, 20 bp, Artificial Sequence
  chemically synthesized
ggtggtacctactcccttca

SEQ ID NO: 51547 - DNA, 20 bp, Artificial Sequence
  chemically synthesized
ctactcccttcacagggtaa

SEQ ID NO: 51548 - DNA, 20 bp, Artificial Sequence
  chemically synthesized
tgaggcctcacagccagtaa

SEQ ID NO: 51549 - DNA, 20 bp, Artificial Sequence
  chemically synthesized
cagtaagtgggttccctggt

SEQ ID NO: 51550 - DNA, 20 bp, Artificial Sequence
  chemically synthesized
tggtctgaatgtgtgtgctg

SEQ ID NO: 51551 - DNA, 20 bp, Artificial Sequence
  chemically synthesized
tgtgtgtgctggaggatcct

SEQ ID NO: 51552 - DNA, 20 bp, Artificial Sequence
  chemically synthesized
tggaggcataaatgggactg

SEQ ID NO: 51553 - DNA, 20 bp, Artificial Sequence
  chemically synthesized
gccagctcccaagcaggttt

SEQ ID NO: 51554 - DNA, 20 bp, Artificial Sequence
  chemically synthesized
aatctgatttaggcttttaa

SEQ ID NO: 51555 - DNA, 20 bp, Artificial Sequence
  chemically synthesized
ccaaaggcctccaacaaccc

SEQ ID NO: 51556 - DNA, 20 bp, Artificial Sequence
  chemically synthesized
aaagaaactccaagctgtat

SEQ ID NO: 51557 - DNA, 20 bp, Artificial Sequence
  chemically synthesized
ggcacttcacaagcatgctt

SEQ ID NO: 51558 - DNA, 20 bp, Artificial Sequence
  chemically synthesized
gaatgaaacttccaactctt

SEQ ID NO: 51559 - DNA, 20 bp, Artificial Sequence
  chemically synthesized
ttttccatcgggaccatcaa

SEQ ID NO: 51560 - DNA, 20 bp, Artificial Sequence
  chemically synthesized
gtgtttgtgtctaaggctga

SEQ ID NO: 51561 - DNA, 20 bp, Artificial Sequence
  chemically synthesized
ctaaggctgactgggtaact

SEQ ID NO: 51562 - DNA, 20 bp, Artificial Sequence
  chemically synthesized
gtcttcagcatcaggcattt

SEQ ID NO: 51563 - DNA, 20 bp, Artificial Sequence
  chemically synthesized
ctaccagtggaacagccact

SEQ ID NO: 51564 - DNA, 20 bp, Artificial Sequence
  chemically synthesized
ctgtttgctcctccgataac

SEQ ID NO: 51565 - DNA, 20 bp, Artificial Sequence
  chemically synthesized
cagcctcccccgttgcccct

SEQ ID NO: 51566 - DNA, 20 bp, Artificial Sequence
  chemically synthesized
accaccactgacctgggaca

SEQ ID NO: 51567 - DNA, 20 bp, Artificial Sequence
  chemically synthesized
cagcaggtctggggcaggag

SEQ ID NO: 51568 - DNA, 20 bp, Artificial Sequence
  chemically synthesized
ctggggcaggaggggggttg

SEQ ID NO: 51569 - DNA, 20 bp, Artificial Sequence
  chemically synthesized
ggcaggaggggggttgtgga

SEQ ID NO: 51570 - DNA, 20 bp, Artificial Sequence
  chemically synthesized
ttcataataacagcagccat

SEQ ID NO: 51571 - DNA, 20 bp, Artificial Sequence
  chemically synthesized
tcccccctcggtacctcctg

SEQ ID NO: 51572 - DNA, 20 bp, Artificial Sequence
  chemically synthesized
actggttcctgtaagcagaa

SEQ ID NO: 51573 - DNA, 20 bp, Artificial Sequence
  chemically synthesized
tcctgtaagcagaagtggat

SEQ ID NO: 51574 - DNA, 20 bp, Artificial Sequence
  chemically synthesized
ggtctgcagtcctggcaccc

SEQ ID NO: 51575 - DNA, 20 bp, Artificial Sequence
  chemically synthesized
gaggaggttaaggtccagag

SEQ ID NO: 51576 - DNA, 20 bp, Artificial Sequence
  chemically synthesized
tggtcatatctggaggggat

SEQ ID NO: 51577 - DNA, 20 bp, Artificial Sequence
  chemically synthesized
acctcctcatctatagaagg

SEQ ID NO: 51578 - DNA, 20 bp, Artificial Sequence
  chemically synthesized
cagacagaggagctgtgcaa

SEQ ID NO: 51579 - DNA, 20 bp, Artificial Sequence
  chemically synthesized
cagaggagctgtgcaaacag

SEQ ID NO: 51580 - DNA, 20 bp, Artificial Sequence
  chemically synthesized
aaggagtcattgtacctggc

SEQ ID NO: 51581 - DNA, 20 bp, Artificial Sequence
  chemically synthesized
gctggccctctgctctcact

SEQ ID NO: 51582 - DNA, 20 bp, Artificial Sequence
  chemically synthesized
gagacgggtactgggtgtgc

SEQ ID NO: 51583 - DNA, 20 bp, Artificial Sequence
  chemically synthesized
tcacactgcccagaggatta

SEQ ID NO: 51584 - DNA, 20 bp, Artificial Sequence
  chemically synthesized
tcttccctctgcagctggcc

SEQ ID NO: 51585 - DNA, 20 bp, Artificial Sequence
  chemically synthesized
aaacaaaggcccagagaggg

SEQ ID NO: 51586 - DNA, 20 bp, Artificial Sequence
  chemically synthesized
agagtgggggccatgtatcc

SEQ ID NO: 51587 - DNA, 20 bp, Artificial Sequence
  chemically synthesized
ctggttttccaggagcaaaa

SEQ ID NO: 51588 - DNA, 20 bp, Artificial Sequence
  chemically synthesized
tgtttctgtttttgctcctg

SEQ ID NO: 51589 - DNA, 20 bp, Artificial Sequence
  chemically synthesized
gggggtcattgtgcagatgg

SEQ ID NO: 51590 - DNA, 20 bp, Artificial Sequence
  chemically synthesized
cacactggttttccaggagc

SEQ ID NO: 51591 - DNA, 20 bp, Artificial Sequence
  chemically synthesized
ccaagcagtaggagaggtgg

SEQ ID NO: 51592 - DNA, 20 bp, Artificial Sequence
  chemically synthesized
gtgcaaacagaaagaaatgg

SEQ ID NO: 51593 - DNA, 20 bp, Artificial Sequence
  chemically synthesized
acctagacaccctcatccac

SEQ ID NO: 51594 - DNA, 20 bp, Artificial Sequence
  chemically synthesized
tctcgcagtgaaaggcatac

SEQ ID NO: 51595 - DNA, 20 bp, Artificial Sequence
  chemically synthesized
gtcgcccgcctacgctgccc

SEQ ID NO: 51596 - DNA, 20 bp, Artificial Sequence
  chemically synthesized
gacgctttgcctgggcagtg

SEQ ID NO: 51597 - DNA, 20 bp, Artificial Sequence
  chemically synthesized
gagctgtgctgcctcaggca

SEQ ID NO: 51598 - DNA, 20 bp, Artificial Sequence
  chemically synthesized
cttcacctctctgaaccagg

SEQ ID NO: 51599 - DNA, 20 bp, Artificial Sequence
  chemically synthesized
cacctgcatcccaaagagtt

SEQ ID NO: 51600 - DNA, 20 bp, Artificial Sequence
  chemically synthesized
gttggaagtttcattcccaa

SEQ ID NO: 51601 - DNA, 20 bp, Artificial Sequence
  chemically synthesized
ttatgtgggtctgcacagcc

SEQ ID NO: 51602 - DNA, 20 bp, Artificial Sequence
  chemically synthesized
tcaattttgaccagcctcag

SEQ ID NO: 51603 - DNA, 20 bp, Artificial Sequence
  chemically synthesized
ttgaccagcctcaggcctgt

SEQ ID NO: 51604 - DNA, 20 bp, Artificial Sequence
  chemically synthesized
gaaaaccagtgtgatccgta

SEQ ID NO: 51605 - DNA, 20 bp, Artificial Sequence
  chemically synthesized
agtgtgatccgtatacagct

SEQ ID NO: 51606 - DNA, 20 bp, Artificial Sequence
  chemically synthesized
gttgaggctagtggggcccc

SEQ ID NO: 51607 - DNA, 20 bp, Artificial Sequence
  chemically synthesized
caatccctttaaaagcctaa

SEQ ID NO: 51608 - DNA, 20 bp, Artificial Sequence
  chemically synthesized
gcccgctgtgcaacccgcaa

SEQ ID NO: 51609 - DNA, 20 bp, Artificial Sequence
  chemically synthesized
tggctgtgaggcctcaggtg

SEQ ID NO: 51610 - DNA, 20 bp, Artificial Sequence
  chemically synthesized
tgtaccttgttgagctgctg

SEQ ID NO: 51611 - DNA, 20 bp, Artificial Sequence
  chemically synthesized
ggtggggtgggccacacttg

SEQ ID NO: 51612 - DNA, 20 bp, Artificial Sequence
  chemically synthesized
ccttccctgcagctccatcc

SEQ ID NO: 51613 - DNA, 20 bp, Artificial Sequence
  chemically synthesized
atttcttcccctctctgggc

SEQ ID NO: 51614 - DNA, 20 bp, Artificial Sequence
  chemically synthesized
cagtaggctggggaggggcg

SEQ ID NO: 51615 - DNA, 20 bp, Artificial Sequence
  chemically synthesized
gaggtacagtcacactgccc

SEQ ID NO: 51616 - DNA, 20 bp, Artificial Sequence
  chemically synthesized
agacctggcaccaataactg

SEQ ID NO: 51617 - DNA, 20 bp, Artificial Sequence
  chemically synthesized
caggtgacatgccgggctgt

SEQ ID NO: 51618 - DNA, 20 bp, Artificial Sequence
  chemically synthesized
cctgtgcctgccagaagaga

SEQ ID NO: 51619 - DNA, 20 bp, Artificial Sequence
  chemically synthesized
cagaagagacagagcttgag

SEQ ID NO: 51620 - DNA, 20 bp, Artificial Sequence
  chemically synthesized
tccacaggtgggagggacag

SEQ ID NO: 51621 - DNA, 20 bp, Artificial Sequence
  chemically synthesized
gaaggggaggggagtctgag

SEQ ID NO: 51622 - DNA, 20 bp, Artificial Sequence
  chemically synthesized
ggagggagggcagcatcagg

SEQ ID NO: 51623 - DNA, 20 bp, Artificial Sequence
  chemically synthesized
ggcacacccagtacccgtct

SEQ ID NO: 51624 - DNA, 20 bp, Artificial Sequence
  chemically synthesized
gcacgtacgccagctcccaa

SEQ ID NO: 51625 - DNA, 20 bp, Artificial Sequence
  chemically synthesized
gttgcacagcgggcgatgca

SEQ ID NO: 51626 - DNA, 20 bp, Artificial Sequence
  chemically synthesized
agcgggcgatgcaatctgat

SEQ ID NO: 51627 - DNA, 20 bp, Artificial Sequence
  chemically synthesized
caatctgatttaggctttta

SEQ ID NO: 51628 - DNA, 20 bp, Artificial Sequence
  chemically synthesized
ccaagctgtatacggatcac

SEQ ID NO: 51629 - DNA, 20 bp, Artificial Sequence
  chemically synthesized
tcacccgaggcacttcacaa

SEQ ID NO: 51630 - DNA, 20 bp, Artificial Sequence
  chemically synthesized
agcacagctcttctttacag

SEQ ID NO: 51631 - DNA, 20 bp, Artificial Sequence
  chemically synthesized
ttccatcgggaccatcaaga

SEQ ID NO: 51632 - DNA, 20 bp, Artificial Sequence
  chemically synthesized
gagcggtctctccgctctga

SEQ ID NO: 51633 - DNA, 20 bp, Artificial Sequence
  chemically synthesized
gctaccagtggaacagccac

SEQ ID NO: 51634 - DNA, 20 bp, Artificial Sequence
  chemically synthesized
ccaccttggacacaggacgc

SEQ ID NO: 51635 - DNA, 20 bp, Artificial Sequence
  chemically synthesized
tcccagccagtggacttagc

SEQ ID NO: 51636 - DNA, 20 bp, Artificial Sequence
  chemically synthesized
ccccgttgcccctctggatc

SEQ ID NO: 51637 - DNA, 20 bp, Artificial Sequence
  chemically synthesized
cgaggacagggccctgtctc

SEQ ID NO: 51638 - DNA, 20 bp, Artificial Sequence
  chemically synthesized
ttcactgcgagaggttctgg

SEQ ID NO: 51639 - DNA, 20 bp, Artificial Sequence
  chemically synthesized
cagcagccatgagggttgtg

SEQ ID NO: 51640 - DNA, 20 bp, Artificial Sequence
  chemically synthesized
aacaaagcgcagccatttct

SEQ ID NO: 51641 - DNA, 20 bp, Artificial Sequence
  chemically synthesized
ataagcctcaccacctctcc

SEQ ID NO: 51642 - DNA, 22 bp, Artificial Sequence
  chemically synthesized
aggcctggcacaggtctgttcc

SEQ ID NO: 51643 - DNA, 22 bp, Artificial Sequence
  chemically synthesized
gcacaggtctgttcctggtcat

SEQ ID NO: 51644 - DNA, 22 bp, Artificial Sequence
  chemically synthesized
ttcctggtcatatctggagggg

SEQ ID NO: 51645 - DNA, 22 bp, Artificial Sequence
  chemically synthesized
ctggtcatatctggaggggatg

SEQ ID NO: 51646 - DNA, 22 bp, Artificial Sequence
  chemically synthesized
gtcatatctggaggggatggag

SEQ ID NO: 51647 - DNA, 22 bp, Artificial Sequence
  chemically synthesized
gaggggatggagaatgtgagcc

SEQ ID NO: 51648 - DNA, 22 bp, Artificial Sequence
  chemically synthesized
ctccccacccctctctggacct

SEQ ID NO: 51649 - DNA, 22 bp, Artificial Sequence
  chemically synthesized
cccacccctctctggaccttaa

SEQ ID NO: 51650 - DNA, 22 bp, Artificial Sequence
  chemically synthesized
tctggaccttaacctcctcatc

SEQ ID NO: 51651 - DNA, 22 bp, Artificial Sequence
  chemically synthesized
tggaccttaacctcctcatcta

SEQ ID NO: 51652 - DNA, 22 bp, Artificial Sequence
  chemically synthesized
gaccttaacctcctcatctata

SEQ ID NO: 51653 - DNA, 22 bp, Artificial Sequence
  chemically synthesized
aacctcctcatctatagaaggg

SEQ ID NO: 51654 - DNA, 22 bp, Artificial Sequence
  chemically synthesized
acctcctcatctatagaagggg

SEQ ID NO: 51655 - DNA, 22 bp, Artificial Sequence
  chemically synthesized
ctcatctatagaaggggagaaa

SEQ ID NO: 51656 - DNA, 22 bp, Artificial Sequence
  chemically synthesized
atctatagaaggggagaaagat

SEQ ID NO: 51657 - DNA, 22 bp, Artificial Sequence
  chemically synthesized
tagaaggggagaaagatgcatg

SEQ ID NO: 51658 - DNA, 22 bp, Artificial Sequence
  chemically synthesized
ataggagacaacagacaggagc

SEQ ID NO: 51659 - DNA, 22 bp, Artificial Sequence
  chemically synthesized
taggagacaacagacaggagcc

SEQ ID NO: 51660 - DNA, 22 bp, Artificial Sequence
  chemically synthesized
tgcaaacagaaagaaatggctg

SEQ ID NO: 51661 - DNA, 22 bp, Artificial Sequence
  chemically synthesized
cgctttgttgctgttgctgtat

SEQ ID NO: 51662 - DNA, 22 bp, Artificial Sequence
  chemically synthesized
tgttgctgttgctgtatcttgg

SEQ ID NO: 51663 - DNA, 22 bp, Artificial Sequence
  chemically synthesized
gttgctgttgctgtatcttggc

SEQ ID NO: 51664 - DNA, 22 bp, Artificial Sequence
  chemically synthesized
ttgctgttgctgtatcttggct

SEQ ID NO: 51665 - DNA, 22 bp, Artificial Sequence
  chemically synthesized
ctgttgctgtatcttggctggt

SEQ ID NO: 51666 - DNA, 22 bp, Artificial Sequence
  chemically synthesized
ttgctgtatcttggctggtgtc

SEQ ID NO: 51667 - DNA, 22 bp, Artificial Sequence
  chemically synthesized
ctgtatcttggctggtgtcccc

SEQ ID NO: 51668 - DNA, 22 bp, Artificial Sequence
  chemically synthesized
tatcttggctggtgtcccccat

SEQ ID NO: 51669 - DNA, 22 bp, Artificial Sequence
  chemically synthesized
ggctggtgtcccccatcctggg

SEQ ID NO: 51670 - DNA, 22 bp, Artificial Sequence
  chemically synthesized
gctggtgtcccccatcctgggg

SEQ ID NO: 51671 - DNA, 22 bp, Artificial Sequence
  chemically synthesized
gtgtcccccatcctggggtgcc

SEQ ID NO: 51672 - DNA, 22 bp, Artificial Sequence
  chemically synthesized
gggtgccaggactgcagaccta

SEQ ID NO: 51673 - DNA, 22 bp, Artificial Sequence
  chemically synthesized
cagacctagacaccctcatcca

SEQ ID NO: 51674 - DNA, 22 bp, Artificial Sequence
  chemically synthesized
gacaccctcatccacttctgct

SEQ ID NO: 51675 - DNA, 22 bp, Artificial Sequence
  chemically synthesized
atccacttctgcttacaggaac

SEQ ID NO: 51676 - DNA, 22 bp, Artificial Sequence
  chemically synthesized
ctgcttacaggaaccagtgtat

SEQ ID NO: 51677 - DNA, 22 bp, Artificial Sequence
  chemically synthesized
tgcttacaggaaccagtgtatc

SEQ ID NO: 51678 - DNA, 22 bp, Artificial Sequence
  chemically synthesized
cttacaggaaccagtgtatcca

SEQ ID NO: 51679 - DNA, 22 bp, Artificial Sequence
  chemically synthesized
acaggaaccagtgtatccacca

SEQ ID NO: 51680 - DNA, 22 bp, Artificial Sequence
  chemically synthesized
caggaaccagtgtatccaccag

SEQ ID NO: 51681 - DNA, 22 bp, Artificial Sequence
  chemically synthesized
ggaaacaggacacaaccctcat

SEQ ID NO: 51682 - DNA, 22 bp, Artificial Sequence
  chemically synthesized
atggctgctgttattatgaaaa

SEQ ID NO: 51683 - DNA, 22 bp, Artificial Sequence
  chemically synthesized
ctgttattatgaaaataggagc

SEQ ID NO: 51684 - DNA, 22 bp, Artificial Sequence
  chemically synthesized
ttattatgaaaataggagctca

SEQ ID NO: 51685 - DNA, 22 bp, Artificial Sequence
  chemically synthesized
ttatgaaaataggagctcagct

SEQ ID NO: 51686 - DNA, 22 bp, Artificial Sequence
  chemically synthesized
tgaaaataggagctcagctgca

SEQ ID NO: 51687 - DNA, 22 bp, Artificial Sequence
  chemically synthesized
agctgcagcctctccatctgcc

SEQ ID NO: 51688 - DNA, 22 bp, Artificial Sequence
  chemically synthesized
cagcctctccatctgccctgca

SEQ ID NO: 51689 - DNA, 22 bp, Artificial Sequence
  chemically synthesized
tccatctgccctgcacctcagc

SEQ ID NO: 51690 - DNA, 22 bp, Artificial Sequence
  chemically synthesized
catctgccctgcacctcagcag

SEQ ID NO: 51691 - DNA, 22 bp, Artificial Sequence
  chemically synthesized
ccctgcacctcagcaggcggat

SEQ ID NO: 51692 - DNA, 22 bp, Artificial Sequence
  chemically synthesized
cacctcagcaggcggataccca

SEQ ID NO: 51693 - DNA, 22 bp, Artificial Sequence
  chemically synthesized
agcaggcggatacccactccac

SEQ ID NO: 51694 - DNA, 22 bp, Artificial Sequence
  chemically synthesized
cacaacccccctcctgccccag

SEQ ID NO: 51695 - DNA, 22 bp, Artificial Sequence
  chemically synthesized
ctgccccagacctgctgcctgc

SEQ ID NO: 51696 - DNA, 22 bp, Artificial Sequence
  chemically synthesized
ccccagacctgctgcctgcctg

SEQ ID NO: 51697 - DNA, 22 bp, Artificial Sequence
  chemically synthesized
ctgcctgcctgggccatgggga

SEQ ID NO: 51698 - DNA, 22 bp, Artificial Sequence
  chemically synthesized
cctgcctgggccatggggagct

SEQ ID NO: 51699 - DNA, 22 bp, Artificial Sequence
  chemically synthesized
cctgggccatggggagctcaga

SEQ ID NO: 51700 - DNA, 22 bp, Artificial Sequence
  chemically synthesized
ggccatggggagctcagaagcc

SEQ ID NO: 51701 - DNA, 22 bp, Artificial Sequence
  chemically synthesized
agaagcctctccagaacctctc

SEQ ID NO: 51702 - DNA, 22 bp, Artificial Sequence
  chemically synthesized
tccagaacctctcgcagtgaaa

SEQ ID NO: 51703 - DNA, 22 bp, Artificial Sequence
  chemically synthesized
cagaacctctcgcagtgaaagg

SEQ ID NO: 51704 - DNA, 22 bp, Artificial Sequence
  chemically synthesized
tcgcagtgaaaggcatacttac

SEQ ID NO: 51705 - DNA, 22 bp, Artificial Sequence
  chemically synthesized
gcagtgaaaggcatacttacga

SEQ ID NO: 51706 - DNA, 22 bp, Artificial Sequence
  chemically synthesized
acgattcactgtcccaggtcag

SEQ ID NO: 51707 - DNA, 22 bp, Artificial Sequence
  chemically synthesized
cgattcactgtcccaggtcagt

SEQ ID NO: 51708 - DNA, 22 bp, Artificial Sequence
  chemically synthesized
actgtcccaggtcagtggtggt

SEQ ID NO: 51709 - DNA, 22 bp, Artificial Sequence
  chemically synthesized
tcccaggtcagtggtggtgcct

SEQ ID NO: 51710 - DNA, 22 bp, Artificial Sequence
  chemically synthesized
aagctgaggagacagggccctg

SEQ ID NO: 51711 - DNA, 22 bp, Artificial Sequence
  chemically synthesized
aggagacagggccctgtcctcg

SEQ ID NO: 51712 - DNA, 22 bp, Artificial Sequence
  chemically synthesized
tcctcgtccgtatttaagcagt

SEQ ID NO: 51713 - DNA, 22 bp, Artificial Sequence
  chemically synthesized
gtccgtatttaagcagtggatc

SEQ ID NO: 51714 - DNA, 22 bp, Artificial Sequence
  chemically synthesized
aagcagtggatccagaggggca

SEQ ID NO: 51715 - DNA, 22 bp, Artificial Sequence
  chemically synthesized
agcagtggatccagaggggcaa

SEQ ID NO: 51716 - DNA, 22 bp, Artificial Sequence
  chemically synthesized
ctggtgaatattaaccaaggtc

SEQ ID NO: 51717 - DNA, 22 bp, Artificial Sequence
  chemically synthesized
gtgaatattaaccaaggtcacc

SEQ ID NO: 51718 - DNA, 22 bp, Artificial Sequence
  chemically synthesized
accaaggtcaccccagttatcg

SEQ ID NO: 51719 - DNA, 22 bp, Artificial Sequence
  chemically synthesized
tcggaggagcaaacaggggcta

SEQ ID NO: 51720 - DNA, 22 bp, Artificial Sequence
  chemically synthesized
agtccactggctgggatctgag

SEQ ID NO: 51721 - DNA, 22 bp, Artificial Sequence
  chemically synthesized
gctgggatctgagtcgcccgcc

SEQ ID NO: 51722 - DNA, 22 bp, Artificial Sequence
  chemically synthesized
ggatctgagtcgcccgcctacg

SEQ ID NO: 51723 - DNA, 22 bp, Artificial Sequence
  chemically synthesized
agtcgcccgcctacgctgcccg

SEQ ID NO: 51724 - DNA, 22 bp, Artificial Sequence
  chemically synthesized
cgctgcccggacgctttgcctg

SEQ ID NO: 51725 - DNA, 22 bp, Artificial Sequence
  chemically synthesized
cccggacgctttgcctgggcag

SEQ ID NO: 51726 - DNA, 22 bp, Artificial Sequence
  chemically synthesized
tgcctgggcagtgtacagcttc

SEQ ID NO: 51727 - DNA, 22 bp, Artificial Sequence
  chemically synthesized
gcctgggcagtgtacagcttcc

SEQ ID NO: 51728 - DNA, 22 bp, Artificial Sequence
  chemically synthesized
cctgggcagtgtacagcttcca

SEQ ID NO: 51729 - DNA, 22 bp, Artificial Sequence
  chemically synthesized
ggcagtgtacagcttccactgc

SEQ ID NO: 51730 - DNA, 22 bp, Artificial Sequence
  chemically synthesized
ccactgcacttaccgaaaggag

SEQ ID NO: 51731 - DNA, 22 bp, Artificial Sequence
  chemically synthesized
cactgcacttaccgaaaggagt

SEQ ID NO: 51732 - DNA, 22 bp, Artificial Sequence
  chemically synthesized
cacttaccgaaaggagtcattg

SEQ ID NO: 51733 - DNA, 22 bp, Artificial Sequence
  chemically synthesized
accgaaaggagtcattgtacct

SEQ ID NO: 51734 - DNA, 22 bp, Artificial Sequence
  chemically synthesized
ccgaaaggagtcattgtacctg

SEQ ID NO: 51735 - DNA, 22 bp, Artificial Sequence
  chemically synthesized
tacctggctcagaaaccacagc

SEQ ID NO: 51736 - DNA, 22 bp, Artificial Sequence
  chemically synthesized
gctcagaaaccacagcgtcctg

SEQ ID NO: 51737 - DNA, 22 bp, Artificial Sequence
  chemically synthesized
agaaaccacagcgtcctgtgtc

SEQ ID NO: 51738 - DNA, 22 bp, Artificial Sequence
  chemically synthesized
tgtccaaggtggagggggtggc

SEQ ID NO: 51739 - DNA, 22 bp, Artificial Sequence
  chemically synthesized
tgggagagtaccacttagctgg

SEQ ID NO: 51740 - DNA, 22 bp, Artificial Sequence
  chemically synthesized
ggagagtaccacttagctggcc

SEQ ID NO: 51741 - DNA, 22 bp, Artificial Sequence
  chemically synthesized
agctggccctctgctctcactg

SEQ ID NO: 51742 - DNA, 22 bp, Artificial Sequence
  chemically synthesized
gctggccctctgctctcactgc

SEQ ID NO: 51743 - DNA, 22 bp, Artificial Sequence
  chemically synthesized
gccctctgctctcactgcagaa

SEQ ID NO: 51744 - DNA, 22 bp, Artificial Sequence
  chemically synthesized
tgctctcactgcagaatcctta

SEQ ID NO: 51745 - DNA, 22 bp, Artificial Sequence
  chemically synthesized
ctctcactgcagaatccttagt

SEQ ID NO: 51746 - DNA, 22 bp, Artificial Sequence
  chemically synthesized
tcactgcagaatccttagtggc

SEQ ID NO: 51747 - DNA, 22 bp, Artificial Sequence
  chemically synthesized
actgcagaatccttagtggctg

SEQ ID NO: 51748 - DNA, 22 bp, Artificial Sequence
  chemically synthesized
cagaatccttagtggctgttcc

SEQ ID NO: 51749 - DNA, 22 bp, Artificial Sequence
  chemically synthesized
agtggctgttccactggtagca

SEQ ID NO: 51750 - DNA, 22 bp, Artificial Sequence
  chemically synthesized
gtggctgttccactggtagcaa

SEQ ID NO: 51751 - DNA, 22 bp, Artificial Sequence
  chemically synthesized
ttccactggtagcaagatctac

SEQ ID NO: 51752 - DNA, 22 bp, Artificial Sequence
  chemically synthesized
cactggtagcaagatctaccat

SEQ ID NO: 51753 - DNA, 22 bp, Artificial Sequence
  chemically synthesized
gtagcaagatctaccatttact

SEQ ID NO: 51754 - DNA, 22 bp, Artificial Sequence
  chemically synthesized
ccatttactgagtcaccccaaa

SEQ ID NO: 51755 - DNA, 22 bp, Artificial Sequence
  chemically synthesized
actgagtcaccccaaaatgcct

SEQ ID NO: 51756 - DNA, 22 bp, Artificial Sequence
  chemically synthesized
ctgagtcaccccaaaatgcctg

SEQ ID NO: 51757 - DNA, 22 bp, Artificial Sequence
  chemically synthesized
agtcaccccaaaatgcctgatg

SEQ ID NO: 51758 - DNA, 22 bp, Artificial Sequence
  chemically synthesized
atgctgaagacttactgccgcc

SEQ ID NO: 51759 - DNA, 22 bp, Artificial Sequence
  chemically synthesized
aagacttactgccgccctggga

SEQ ID NO: 51760 - DNA, 22 bp, Artificial Sequence
  chemically synthesized
actgccgccctgggagatcaga

SEQ ID NO: 51761 - DNA, 22 bp, Artificial Sequence
  chemically synthesized
ctgccgccctgggagatcagag

SEQ ID NO: 51762 - DNA, 22 bp, Artificial Sequence
  chemically synthesized
ccgccctgggagatcagagtgg

SEQ ID NO: 51763 - DNA, 22 bp, Artificial Sequence
  chemically synthesized
ggagatcagagtgggttagagc

SEQ ID NO: 51764 - DNA, 22 bp, Artificial Sequence
  chemically synthesized
gagcccatttgacagatgagga

SEQ ID NO: 51765 - DNA, 22 bp, Artificial Sequence
  chemically synthesized
gacagatgaggaaacaggctca

SEQ ID NO: 51766 - DNA, 22 bp, Artificial Sequence
  chemically synthesized
acagatgaggaaacaggctcag

SEQ ID NO: 51767 - DNA, 22 bp, Artificial Sequence
  chemically synthesized
agagcggagagaccgctcatcc

SEQ ID NO: 51768 - DNA, 22 bp, Artificial Sequence
  chemically synthesized
atccaaagttacccagtcagcc

SEQ ID NO: 51769 - DNA, 22 bp, Artificial Sequence
  chemically synthesized
cccagtcagccttagacacaaa

SEQ ID NO: 51770 - DNA, 22 bp, Artificial Sequence
  chemically synthesized
agacacaaacaccctcttgatg

SEQ ID NO: 51771 - DNA, 22 bp, Artificial Sequence
  chemically synthesized
gacacaaacaccctcttgatgg

SEQ ID NO: 51772 - DNA, 22 bp, Artificial Sequence
  chemically synthesized
ttgatggtcccgatggaaaaat

SEQ ID NO: 51773 - DNA, 22 bp, Artificial Sequence
  chemically synthesized
gatggtcccgatggaaaaatgg

SEQ ID NO: 51774 - DNA, 22 bp, Artificial Sequence
  chemically synthesized
atggtcccgatggaaaaatgga

SEQ ID NO: 51775 - DNA, 22 bp, Artificial Sequence
  chemically synthesized
aggcagacacaaccgtcaggct

SEQ ID NO: 51776 - DNA, 22 bp, Artificial Sequence
  chemically synthesized
gcatggggggccgtgagacagg

SEQ ID NO: 51777 - DNA, 22 bp, Artificial Sequence
  chemically synthesized
taaagaagagctgtgctgcctc

SEQ ID NO: 51778 - DNA, 22 bp, Artificial Sequence
  chemically synthesized
tgctgcctcaggcaggccgctt

SEQ ID NO: 51779 - DNA, 22 bp, Artificial Sequence
  chemically synthesized
cctcaggcaggccgcttcacct

SEQ ID NO: 51780 - DNA, 22 bp, Artificial Sequence
  chemically synthesized
aggcaggccgcttcacctctct

SEQ ID NO: 51781 - DNA, 22 bp, Artificial Sequence
  chemically synthesized
cacctctctgaaccaggaactg

SEQ ID NO: 51782 - DNA, 22 bp, Artificial Sequence
  chemically synthesized
acctctctgaaccaggaactgt

SEQ ID NO: 51783 - DNA, 22 bp, Artificial Sequence
  chemically synthesized
tctgaaccaggaactgtttcac

SEQ ID NO: 51784 - DNA, 22 bp, Artificial Sequence
  chemically synthesized
tgaaccaggaactgtttcacct

SEQ ID NO: 51785 - DNA, 22 bp, Artificial Sequence
  chemically synthesized
aaccaggaactgtttcacctgc

SEQ ID NO: 51786 - DNA, 22 bp, Artificial Sequence
  chemically synthesized
tttcacctgcatcccaaagagt

SEQ ID NO: 51787 - DNA, 22 bp, Artificial Sequence
  chemically synthesized
cacctgcatcccaaagagttgg

SEQ ID NO: 51788 - DNA, 22 bp, Artificial Sequence
  chemically synthesized
acctgcatcccaaagagttgga

SEQ ID NO: 51789 - DNA, 22 bp, Artificial Sequence
  chemically synthesized
catcccaaagagttggaagttt

SEQ ID NO: 51790 - DNA, 22 bp, Artificial Sequence
  chemically synthesized
gaagtttcattcccaagcatgc

SEQ ID NO: 51791 - DNA, 22 bp, Artificial Sequence
  chemically synthesized
cattcccaagcatgcttgtgaa

SEQ ID NO: 51792 - DNA, 22 bp, Artificial Sequence
  chemically synthesized
attcccaagcatgcttgtgaag

SEQ ID NO: 51793 - DNA, 22 bp, Artificial Sequence
  chemically synthesized
ccaagcatgcttgtgaagtgcc

SEQ ID NO: 51794 - DNA, 22 bp, Artificial Sequence
  chemically synthesized
gtgaagtgcctcgggtgaagtg

SEQ ID NO: 51795 - DNA, 22 bp, Artificial Sequence
  chemically synthesized
tgaagtgcctcgggtgaagtgc

SEQ ID NO: 51796 - DNA, 22 bp, Artificial Sequence
  chemically synthesized
gggtgaagtgcctggcacacag

SEQ ID NO: 51797 - DNA, 22 bp, Artificial Sequence
  chemically synthesized
gcacacagtaggctctttatgt

SEQ ID NO: 51798 - DNA, 22 bp, Artificial Sequence
  chemically synthesized
tttatgtgggtctgcacagccc

SEQ ID NO: 51799 - DNA, 22 bp, Artificial Sequence
  chemically synthesized
tatgtgggtctgcacagccctc

SEQ ID NO: 51800 - DNA, 22 bp, Artificial Sequence
  chemically synthesized
atgtgggtctgcacagccctct

SEQ ID NO: 51801 - DNA, 22 bp, Artificial Sequence
  chemically synthesized
tgtgggtctgcacagccctctg

SEQ ID NO: 51802 - DNA, 22 bp, Artificial Sequence
  chemically synthesized
cacagccctctgcttagtctgc

SEQ ID NO: 51803 - DNA, 22 bp, Artificial Sequence
  chemically synthesized
tgcttagtctgccccccaggct

SEQ ID NO: 51804 - DNA, 22 bp, Artificial Sequence
  chemically synthesized
cttagtctgccccccaggctgc

SEQ ID NO: 51805 - DNA, 22 bp, Artificial Sequence
  chemically synthesized
agtctgccccccaggctgctca

SEQ ID NO: 51806 - DNA, 22 bp, Artificial Sequence
  chemically synthesized
gtctgccccccaggctgctcag

SEQ ID NO: 51807 - DNA, 22 bp, Artificial Sequence
  chemically synthesized
ccccccaggctgctcagagcag

SEQ ID NO: 51808 - DNA, 22 bp, Artificial Sequence
  chemically synthesized
ctcagagcaggaggaggttcaa

SEQ ID NO: 51809 - DNA, 22 bp, Artificial Sequence
  chemically synthesized
agagcaggaggaggttcaattt

SEQ ID NO: 51810 - DNA, 22 bp, Artificial Sequence
  chemically synthesized
aattttgaccagcctcaggcct

SEQ ID NO: 51811 - DNA, 22 bp, Artificial Sequence
  chemically synthesized
tgaccagcctcaggcctgtttc

SEQ ID NO: 51812 - DNA, 22 bp, Artificial Sequence
  chemically synthesized
gaccagcctcaggcctgtttct

SEQ ID NO: 51813 - DNA, 22 bp, Artificial Sequence
  chemically synthesized
accagcctcaggcctgtttctg

SEQ ID NO: 51814 - DNA, 22 bp, Artificial Sequence
  chemically synthesized
aggcctgtttctgtttttgctc

SEQ ID NO: 51815 - DNA, 22 bp, Artificial Sequence
  chemically synthesized
tttctgtttttgctcctggaaa

SEQ ID NO: 51816 - DNA, 22 bp, Artificial Sequence
  chemically synthesized
ctgtttttgctcctggaaaacc

SEQ ID NO: 51817 - DNA, 22 bp, Artificial Sequence
  chemically synthesized
tgtttttgctcctggaaaacca

SEQ ID NO: 51818 - DNA, 22 bp, Artificial Sequence
  chemically synthesized
tttttgctcctggaaaaccagt

SEQ ID NO: 51819 - DNA, 22 bp, Artificial Sequence
  chemically synthesized
ttgctcctggaaaaccagtgtg

SEQ ID NO: 51820 - DNA, 22 bp, Artificial Sequence
  chemically synthesized
tgctcctggaaaaccagtgtga

SEQ ID NO: 51821 - DNA, 22 bp, Artificial Sequence
  chemically synthesized
gctcctggaaaaccagtgtgat

SEQ ID NO: 51822 - DNA, 22 bp, Artificial Sequence
  chemically synthesized
ctcctggaaaaccagtgtgatc

SEQ ID NO: 51823 - DNA, 22 bp, Artificial Sequence
  chemically synthesized
ctggaaaaccagtgtgatccgt

SEQ ID NO: 51824 - DNA, 22 bp, Artificial Sequence
  chemically synthesized
gaaaaccagtgtgatccgtata

SEQ ID NO: 51825 - DNA, 22 bp, Artificial Sequence
  chemically synthesized
ggagtttctttggatacatggc

SEQ ID NO: 51826 - DNA, 22 bp, Artificial Sequence
  chemically synthesized
gagtttctttggatacatggcc

SEQ ID NO: 51827 - DNA, 22 bp, Artificial Sequence
  chemically synthesized
ctttggatacatggcccccact

SEQ ID NO: 51828 - DNA, 22 bp, Artificial Sequence
  chemically synthesized
tttggatacatggcccccactc

SEQ ID NO: 51829 - DNA, 22 bp, Artificial Sequence
  chemically synthesized
tggatacatggcccccactctg

SEQ ID NO: 51830 - DNA, 22 bp, Artificial Sequence
  chemically synthesized
ggatacatggcccccactctgg

SEQ ID NO: 51831 - DNA, 22 bp, Artificial Sequence
  chemically synthesized
gatacatggcccccactctggg

SEQ ID NO: 51832 - DNA, 22 bp, Artificial Sequence
  chemically synthesized
tggggttgttggaggcctttgg

SEQ ID NO: 51833 - DNA, 22 bp, Artificial Sequence
  chemically synthesized
gggttgttggaggcctttggag

SEQ ID NO: 51834 - DNA, 22 bp, Artificial Sequence
  chemically synthesized
ttggaggcctttggagactgct

SEQ ID NO: 51835 - DNA, 22 bp, Artificial Sequence
  chemically synthesized
gaggcctttggagactgctggg

SEQ ID NO: 51836 - DNA, 22 bp, Artificial Sequence
  chemically synthesized
tggagactgctgggggtggagg

SEQ ID NO: 51837 - DNA, 22 bp, Artificial Sequence
  chemically synthesized
ggagactgctgggggtggaggg

SEQ ID NO: 51838 - DNA, 22 bp, Artificial Sequence
  chemically synthesized
gagactgctgggggtggagggg

SEQ ID NO: 51839 - DNA, 22 bp, Artificial Sequence
  chemically synthesized
ctgggggtggaggggaggggag

SEQ ID NO: 51840 - DNA, 22 bp, Artificial Sequence
  chemically synthesized
ggggtggaggggaggggaggta

SEQ ID NO: 51841 - DNA, 22 bp, Artificial Sequence
  chemically synthesized
aggctagtggggccccacttga

SEQ ID NO: 51842 - DNA, 22 bp, Artificial Sequence
  chemically synthesized
gtggggccccacttgattgcaa

SEQ ID NO: 51843 - DNA, 22 bp, Artificial Sequence
  chemically synthesized
gattgcaatccctttaaaagcc

SEQ ID NO: 51844 - DNA, 22 bp, Artificial Sequence
  chemically synthesized
attgcaatccctttaaaagcct

SEQ ID NO: 51845 - DNA, 22 bp, Artificial Sequence
  chemically synthesized
caatccctttaaaagcctaaat

SEQ ID NO: 51846 - DNA, 22 bp, Artificial Sequence
  chemically synthesized
taaaagcctaaatcagattgca

SEQ ID NO: 51847 - DNA, 22 bp, Artificial Sequence
  chemically synthesized
aaaagcctaaatcagattgcat

SEQ ID NO: 51848 - DNA, 22 bp, Artificial Sequence
  chemically synthesized
aaagcctaaatcagattgcatc

SEQ ID NO: 51849 - DNA, 22 bp, Artificial Sequence
  chemically synthesized
aatcagattgcatcgcccgctg

SEQ ID NO: 51850 - DNA, 22 bp, Artificial Sequence
  chemically synthesized
catcgcccgctgtgcaacccgc

SEQ ID NO: 51851 - DNA, 22 bp, Artificial Sequence
  chemically synthesized
tgcaacccgcaaacctgcttgg

SEQ ID NO: 51852 - DNA, 22 bp, Artificial Sequence
  chemically synthesized
cttgggagctggcgtacgtgcc

SEQ ID NO: 51853 - DNA, 22 bp, Artificial Sequence
  chemically synthesized
gggagctggcgtacgtgccgta

SEQ ID NO: 51854 - DNA, 22 bp, Artificial Sequence
  chemically synthesized
ggagctggcgtacgtgccgtag

SEQ ID NO: 51855 - DNA, 22 bp, Artificial Sequence
  chemically synthesized
gcgtacgtgccgtagatacttg

SEQ ID NO: 51856 - DNA, 22 bp, Artificial Sequence
  chemically synthesized
gcagagtgaatggatgagtgca

SEQ ID NO: 51857 - DNA, 22 bp, Artificial Sequence
  chemically synthesized
cagagtgaatggatgagtgcat

SEQ ID NO: 51858 - DNA, 22 bp, Artificial Sequence
  chemically synthesized
ttgccccttctgtcattcacca

SEQ ID NO: 51859 - DNA, 22 bp, Artificial Sequence
  chemically synthesized
tgccccttctgtcattcaccag

SEQ ID NO: 51860 - DNA, 22 bp, Artificial Sequence
  chemically synthesized
gccccttctgtcattcaccagt

SEQ ID NO: 51861 - DNA, 22 bp, Artificial Sequence
  chemically synthesized
ccccttctgtcattcaccagtc

SEQ ID NO: 51862 - DNA, 22 bp, Artificial Sequence
  chemically synthesized
ctgtcattcaccagtcccattt

SEQ ID NO: 51863 - DNA, 22 bp, Artificial Sequence
  chemically synthesized
tgtcattcaccagtcccattta

SEQ ID NO: 51864 - DNA, 22 bp, Artificial Sequence
  chemically synthesized
tcattcaccagtcccatttatg

SEQ ID NO: 51865 - DNA, 22 bp, Artificial Sequence
  chemically synthesized
accagtcccatttatgcctcca

SEQ ID NO: 51866 - DNA, 22 bp, Artificial Sequence
  chemically synthesized
atgcctccaccttggggctcta

SEQ ID NO: 51867 - DNA, 22 bp, Artificial Sequence
  chemically synthesized
tgcctccaccttggggctctac

SEQ ID NO: 51868 - DNA, 22 bp, Artificial Sequence
  chemically synthesized
caccttggggctctaccaggcg

SEQ ID NO: 51869 - DNA, 22 bp, Artificial Sequence
  chemically synthesized
ggggctctaccaggcgagtgac

SEQ ID NO: 51870 - DNA, 22 bp, Artificial Sequence
  chemically synthesized
gggctctaccaggcgagtgacc

SEQ ID NO: 51871 - DNA, 22 bp, Artificial Sequence
  chemically synthesized
taccaggcgagtgacccacagg

SEQ ID NO: 51872 - DNA, 22 bp, Artificial Sequence
  chemically synthesized
ccaggcgagtgacccacaggat

SEQ ID NO: 51873 - DNA, 22 bp, Artificial Sequence
  chemically synthesized
cagcacacacattcagaccagg

SEQ ID NO: 51874 - DNA, 22 bp, Artificial Sequence
  chemically synthesized
agaccagggaacccacttactg

SEQ ID NO: 51875 - DNA, 22 bp, Artificial Sequence
  chemically synthesized
actggctgtgaggcctcaggtg

SEQ ID NO: 51876 - DNA, 22 bp, Artificial Sequence
  chemically synthesized
ctggctgtgaggcctcaggtga

SEQ ID NO: 51877 - DNA, 22 bp, Artificial Sequence
  chemically synthesized
gctgtgaggcctcaggtgagtt

SEQ ID NO: 51878 - DNA, 22 bp, Artificial Sequence
  chemically synthesized
tgaggcctcaggtgagttgttt

SEQ ID NO: 51879 - DNA, 22 bp, Artificial Sequence
  chemically synthesized
aggtgagttgtttaaccgctcc

SEQ ID NO: 51880 - DNA, 22 bp, Artificial Sequence
  chemically synthesized
tttaaccgctccgagcctcaat

SEQ ID NO: 51881 - DNA, 22 bp, Artificial Sequence
  chemically synthesized
aaccgctccgagcctcaatttc

SEQ ID NO: 51882 - DNA, 22 bp, Artificial Sequence
  chemically synthesized
accgctccgagcctcaatttcc

SEQ ID NO: 51883 - DNA, 22 bp, Artificial Sequence
  chemically synthesized
cgagcctcaatttccctatctg

SEQ ID NO: 51884 - DNA, 22 bp, Artificial Sequence
  chemically synthesized
aatttccctatctgtaaaatgg

SEQ ID NO: 51885 - DNA, 22 bp, Artificial Sequence
  chemically synthesized
ccctatctgtaaaatggggatg

SEQ ID NO: 51886 - DNA, 22 bp, Artificial Sequence
  chemically synthesized
cctatctgtaaaatggggatgg

SEQ ID NO: 51887 - DNA, 22 bp, Artificial Sequence
  chemically synthesized
tctgtaaaatggggatggtgac

SEQ ID NO: 51888 - DNA, 22 bp, Artificial Sequence
  chemically synthesized
taaaatggggatggtgacggta

SEQ ID NO: 51889 - DNA, 22 bp, Artificial Sequence
  chemically synthesized
gttgagctgctgtgaggattaa

SEQ ID NO: 51890 - DNA, 22 bp, Artificial Sequence
  chemically synthesized
ttgagctgctgtgaggattaaa

SEQ ID NO: 51891 - DNA, 22 bp, Artificial Sequence
  chemically synthesized
agctgctgtgaggattaaaatg

SEQ ID NO: 51892 - DNA, 22 bp, Artificial Sequence
  chemically synthesized
ctgtgaggattaaaatgcaaca

SEQ ID NO: 51893 - DNA, 22 bp, Artificial Sequence
  chemically synthesized
tgaggattaaaatgcaacagtt

SEQ ID NO: 51894 - DNA, 22 bp, Artificial Sequence
  chemically synthesized
aaatgcaacagttcaaggaaag

SEQ ID NO: 51895 - DNA, 22 bp, Artificial Sequence
  chemically synthesized
aaggaaagctcagagacgggta

SEQ ID NO: 51896 - DNA, 22 bp, Artificial Sequence
  chemically synthesized
agagacgggtactgggtgtgcc

SEQ ID NO: 51897 - DNA, 22 bp, Artificial Sequence
  chemically synthesized
ggtgtgcccagaaagcccctcc

SEQ ID NO: 51898 - DNA, 22 bp, Artificial Sequence
  chemically synthesized
ctgatgctgccctccctccccc

SEQ ID NO: 51899 - DNA, 22 bp, Artificial Sequence
  chemically synthesized
atgctgccctccctcccccgtg

SEQ ID NO: 51900 - DNA, 22 bp, Artificial Sequence
  chemically synthesized
ccctccctcccccgtgtcaggg

SEQ ID NO: 51901 - DNA, 22 bp, Artificial Sequence
  chemically synthesized
cctcccccgtgtcaggggctgg

SEQ ID NO: 51902 - DNA, 22 bp, Artificial Sequence
  chemically synthesized
ccccgtgtcaggggctggtgtc

SEQ ID NO: 51903 - DNA, 22 bp, Artificial Sequence
  chemically synthesized
gtgtcactggggtggggtgggc

SEQ ID NO: 51904 - DNA, 22 bp, Artificial Sequence
  chemically synthesized
gggtggggtgggccacacttga

SEQ ID NO: 51905 - DNA, 22 bp, Artificial Sequence
  chemically synthesized
gaagagctttcctccaggcagt

SEQ ID NO: 51906 - DNA, 22 bp, Artificial Sequence
  chemically synthesized
aagagctttcctccaggcagtc

SEQ ID NO: 51907 - DNA, 22 bp, Artificial Sequence
  chemically synthesized
tcctccaggcagtctctcattc

SEQ ID NO: 51908 - DNA, 22 bp, Artificial Sequence
  chemically synthesized
cctccaggcagtctctcattca

SEQ ID NO: 51909 - DNA, 22 bp, Artificial Sequence
  chemically synthesized
ctccaggcagtctctcattcag

SEQ ID NO: 51910 - DNA, 22 bp, Artificial Sequence
  chemically synthesized
caggcagtctctcattcagtta

SEQ ID NO: 51911 - DNA, 22 bp, Artificial Sequence
  chemically synthesized
tcattcagttaccctgtgaagg

SEQ ID NO: 51912 - DNA, 22 bp, Artificial Sequence
  chemically synthesized
attcagttaccctgtgaaggga

SEQ ID NO: 51913 - DNA, 22 bp, Artificial Sequence
  chemically synthesized
agttaccctgtgaagggagtag

SEQ ID NO: 51914 - DNA, 22 bp, Artificial Sequence
  chemically synthesized
ccctgtgaagggagtaggtacc

SEQ ID NO: 51915 - DNA, 22 bp, Artificial Sequence
  chemically synthesized
tgaagggagtaggtaccaccct

SEQ ID NO: 51916 - DNA, 22 bp, Artificial Sequence
  chemically synthesized
ctttcaggcagcgggaaactga

SEQ ID NO: 51917 - DNA, 22 bp, Artificial Sequence
  chemically synthesized
tcaggcagcgggaaactgagct

SEQ ID NO: 51918 - DNA, 22 bp, Artificial Sequence
  chemically synthesized
caggcagcgggaaactgagctc

SEQ ID NO: 51919 - DNA, 22 bp, Artificial Sequence
  chemically synthesized
aggcagcgggaaactgagctca

SEQ ID NO: 51920 - DNA, 22 bp, Artificial Sequence
  chemically synthesized
agctcagactcccctccccttc

SEQ ID NO: 51921 - DNA, 22 bp, Artificial Sequence
  chemically synthesized
agactcccctccccttctctct

SEQ ID NO: 51922 - DNA, 22 bp, Artificial Sequence
  chemically synthesized
ccctccccttctctctgagctc

SEQ ID NO: 51923 - DNA, 22 bp, Artificial Sequence
  chemically synthesized
cccttctctctgagctcccttc

SEQ ID NO: 51924 - DNA, 22 bp, Artificial Sequence
  chemically synthesized
ctctctgagctcccttccctgc

SEQ ID NO: 51925 - DNA, 22 bp, Artificial Sequence
  chemically synthesized
tctctgagctcccttccctgca

SEQ ID NO: 51926 - DNA, 22 bp, Artificial Sequence
  chemically synthesized
tctgagctcccttccctgcagc

SEQ ID NO: 51927 - DNA, 22 bp, Artificial Sequence
  chemically synthesized
tgagctcccttccctgcagctc

SEQ ID NO: 51928 - DNA, 22 bp, Artificial Sequence
  chemically synthesized
agctcccttccctgcagctcca

SEQ ID NO: 51929 - DNA, 22 bp, Artificial Sequence
  chemically synthesized
ccttccctgcagctccatcccc

SEQ ID NO: 51930 - DNA, 22 bp, Artificial Sequence
  chemically synthesized
ccctgcagctccatcccctggc

SEQ ID NO: 51931 - DNA, 22 bp, Artificial Sequence
  chemically synthesized
cctgcagctccatcccctggct

SEQ ID NO: 51932 - DNA, 22 bp, Artificial Sequence
  chemically synthesized
cagctccatcccctggcttcag

SEQ ID NO: 51933 - DNA, 22 bp, Artificial Sequence
  chemically synthesized
catcccctggcttcagggcccc

SEQ ID NO: 51934 - DNA, 22 bp, Artificial Sequence
  chemically synthesized
gcttcagggcccctgtccttcc

SEQ ID NO: 51935 - DNA, 22 bp, Artificial Sequence
  chemically synthesized
cagggcccctgtccttcccctg

SEQ ID NO: 51936 - DNA, 22 bp, Artificial Sequence
  chemically synthesized
agggcccctgtccttcccctga

SEQ ID NO: 51937 - DNA, 22 bp, Artificial Sequence
  chemically synthesized
tccttcccctgagctggctgaa

SEQ ID NO: 51938 - DNA, 22 bp, Artificial Sequence
  chemically synthesized
cccctgagctggctgaatggat

SEQ ID NO: 51939 - DNA, 22 bp, Artificial Sequence
  chemically synthesized
ccctgagctggctgaatggata

SEQ ID NO: 51940 - DNA, 22 bp, Artificial Sequence
  chemically synthesized
agctggctgaatggatattccg

SEQ ID NO: 51941 - DNA, 22 bp, Artificial Sequence
  chemically synthesized
gctgaatggatattccgctgct

SEQ ID NO: 51942 - DNA, 22 bp, Artificial Sequence
  chemically synthesized
aatggatattccgctgctctac

SEQ ID NO: 51943 - DNA, 22 bp, Artificial Sequence
  chemically synthesized
cgctgctctacatccactcaca

SEQ ID NO: 51944 - DNA, 22 bp, Artificial Sequence
  chemically synthesized
ctctacatccactcacagctcc

SEQ ID NO: 51945 - DNA, 22 bp, Artificial Sequence
  chemically synthesized
tacatccactcacagctccagc

SEQ ID NO: 51946 - DNA, 22 bp, Artificial Sequence
  chemically synthesized
catccactcacagctccagcac

SEQ ID NO: 51947 - DNA, 22 bp, Artificial Sequence
  chemically synthesized
acagctccagcactgggctgtg

SEQ ID NO: 51948 - DNA, 22 bp, Artificial Sequence
  chemically synthesized
cagcactgggctgtggttgagg

SEQ ID NO: 51949 - DNA, 22 bp, Artificial Sequence
  chemically synthesized
ggctgtggttgaggtcgcctgc

SEQ ID NO: 51950 - DNA, 22 bp, Artificial Sequence
  chemically synthesized
tggttgaggtcgcctgccctcg

SEQ ID NO: 51951 - DNA, 22 bp, Artificial Sequence
  chemically synthesized
aggtcgcctgccctcggtagct

SEQ ID NO: 51952 - DNA, 22 bp, Artificial Sequence
  chemically synthesized
ccctcggtagctcctgggcatt

SEQ ID NO: 51953 - DNA, 22 bp, Artificial Sequence
  chemically synthesized
ggtagctcctgggcatttcttc

SEQ ID NO: 51954 - DNA, 22 bp, Artificial Sequence
  chemically synthesized
ctgggcatttcttcccctctct

SEQ ID NO: 51955 - DNA, 22 bp, Artificial Sequence
  chemically synthesized
ggcatttcttcccctctctggg

SEQ ID NO: 51956 - DNA, 22 bp, Artificial Sequence
  chemically synthesized
cttcccctctctgggcctttgt

SEQ ID NO: 51957 - DNA, 22 bp, Artificial Sequence
  chemically synthesized
ttcccctctctgggcctttgtt

SEQ ID NO: 51958 - DNA, 22 bp, Artificial Sequence
  chemically synthesized
cccctctctgggcctttgtttt

SEQ ID NO: 51959 - DNA, 22 bp, Artificial Sequence
  chemically synthesized
ccctctctgggcctttgttttc

SEQ ID NO: 51960 - DNA, 22 bp, Artificial Sequence
  chemically synthesized
tctgggcctttgttttcccatc

SEQ ID NO: 51961 - DNA, 22 bp, Artificial Sequence
  chemically synthesized
tgggcctttgttttcccatctg

SEQ ID NO: 51962 - DNA, 22 bp, Artificial Sequence
  chemically synthesized
ggcctttgttttcccatctgca

SEQ ID NO: 51963 - DNA, 22 bp, Artificial Sequence
  chemically synthesized
tgttttcccatctgcacaatga

SEQ ID NO: 51964 - DNA, 22 bp, Artificial Sequence
  chemically synthesized
gttttcccatctgcacaatgac

SEQ ID NO: 51965 - DNA, 22 bp, Artificial Sequence
  chemically synthesized
ttttcccatctgcacaatgacc

SEQ ID NO: 51966 - DNA, 22 bp, Artificial Sequence
  chemically synthesized
tcccatctgcacaatgaccccc

SEQ ID NO: 51967 - DNA, 22 bp, Artificial Sequence
  chemically synthesized
cccatctgcacaatgaccccca

SEQ ID NO: 51968 - DNA, 22 bp, Artificial Sequence
  chemically synthesized
ccatctgcacaatgacccccac

SEQ ID NO: 51969 - DNA, 22 bp, Artificial Sequence
  chemically synthesized
cacaatgacccccactctaagc

SEQ ID NO: 51970 - DNA, 22 bp, Artificial Sequence
  chemically synthesized
taagccctgctgtccctcccac

SEQ ID NO: 51971 - DNA, 22 bp, Artificial Sequence
  chemically synthesized
agccctgctgtccctcccacct

SEQ ID NO: 51972 - DNA, 22 bp, Artificial Sequence
  chemically synthesized
ctgtccctcccacctgtggaac

SEQ ID NO: 51973 - DNA, 22 bp, Artificial Sequence
  chemically synthesized
tccctcccacctgtggaactga

SEQ ID NO: 51974 - DNA, 22 bp, Artificial Sequence
  chemically synthesized
ccacctgtggaactgagtgagc

SEQ ID NO: 51975 - DNA, 22 bp, Artificial Sequence
  chemically synthesized
tggaactgagtgagcagcagca

SEQ ID NO: 51976 - DNA, 22 bp, Artificial Sequence
  chemically synthesized
agtgagcagcagcagcaatgtc

SEQ ID NO: 51977 - DNA, 22 bp, Artificial Sequence
  chemically synthesized
tcctgctctcctcaagctctcc

SEQ ID NO: 51978 - DNA, 22 bp, Artificial Sequence
  chemically synthesized
cctgctctcctcaagctctcct

SEQ ID NO: 51979 - DNA, 22 bp, Artificial Sequence
  chemically synthesized
ctgctctcctcaagctctcctc

SEQ ID NO: 51980 - DNA, 22 bp, Artificial Sequence
  chemically synthesized
ctctcctcaagctctcctcaag

SEQ ID NO: 51981 - DNA, 22 bp, Artificial Sequence
  chemically synthesized
tcctcaagctctcctcaagctc

SEQ ID NO: 51982 - DNA, 22 bp, Artificial Sequence
  chemically synthesized
ctcaagctctcctcaagctctg

SEQ ID NO: 51983 - DNA, 22 bp, Artificial Sequence
  chemically synthesized
aagctctcctcaagctctgtct

SEQ ID NO: 51984 - DNA, 22 bp, Artificial Sequence
  chemically synthesized
tcctcaagctctgtctcttctg

SEQ ID NO: 51985 - DNA, 22 bp, Artificial Sequence
  chemically synthesized
ctcaagctctgtctcttctggc

SEQ ID NO: 51986 - DNA, 22 bp, Artificial Sequence
  chemically synthesized
aagctctgtctcttctggcagg

SEQ ID NO: 51987 - DNA, 22 bp, Artificial Sequence
  chemically synthesized
tgtctcttctggcaggcacagg

SEQ ID NO: 51988 - DNA, 22 bp, Artificial Sequence
  chemically synthesized
tctcttctggcaggcacaggag

SEQ ID NO: 51989 - DNA, 22 bp, Artificial Sequence
  chemically synthesized
ttctggcaggcacaggagagtg

SEQ ID NO: 51990 - DNA, 22 bp, Artificial Sequence
  chemically synthesized
ctggcaggcacaggagagtggc

SEQ ID NO: 51991 - DNA, 22 bp, Artificial Sequence
  chemically synthesized
tggcaggcacaggagagtggcc

SEQ ID NO: 51992 - DNA, 22 bp, Artificial Sequence
  chemically synthesized
gcaggcacaggagagtggcctg

SEQ ID NO: 51993 - DNA, 22 bp, Artificial Sequence
  chemically synthesized
aaggctggcaggaggttgccgc

SEQ ID NO: 51994 - DNA, 22 bp, Artificial Sequence
  chemically synthesized
gcaggaggttgccgcccctcca

SEQ ID NO: 51995 - DNA, 22 bp, Artificial Sequence
  chemically synthesized
ccgcccctccaacctggaattc

SEQ ID NO: 51996 - DNA, 22 bp, Artificial Sequence
  chemically synthesized
caacctggaattcctggcagca

SEQ ID NO: 51997 - DNA, 22 bp, Artificial Sequence
  chemically synthesized
gaattcctggcagcagcagcgg

SEQ ID NO: 51998 - DNA, 22 bp, Artificial Sequence
  chemically synthesized
ctggcagcagcagcggctaggc

SEQ ID NO: 51999 - DNA, 22 bp, Artificial Sequence
  chemically synthesized
gcagcagcagcggctaggcctt

SEQ ID NO: 52000 - DNA, 22 bp, Artificial Sequence
  chemically synthesized
ggccttcctcggaggcccgacc

SEQ ID NO: 52001 - DNA, 22 bp, Artificial Sequence
  chemically synthesized
cctcggaggcccgaccccctcc

SEQ ID NO: 52002 - DNA, 22 bp, Artificial Sequence
  chemically synthesized
ctcggaggcccgaccccctcct

SEQ ID NO: 52003 - DNA, 22 bp, Artificial Sequence
  chemically synthesized
ggaggcccgaccccctcctcct

SEQ ID NO: 52004 - DNA, 22 bp, Artificial Sequence
  chemically synthesized
ctccttcttggttcagctcagg

SEQ ID NO: 52005 - DNA, 22 bp, Artificial Sequence
  chemically synthesized
cttcttggttcagctcaggact

SEQ ID NO: 52006 - DNA, 22 bp, Artificial Sequence
  chemically synthesized
cttggttcagctcaggactctg

SEQ ID NO: 52007 - DNA, 22 bp, Artificial Sequence
  chemically synthesized
ttggttcagctcaggactctga

SEQ ID NO: 52008 - DNA, 22 bp, Artificial Sequence
  chemically synthesized
ggttcagctcaggactctgagg

SEQ ID NO: 52009 - DNA, 22 bp, Artificial Sequence
  chemically synthesized
gttcagctcaggactctgaggg

SEQ ID NO: 52010 - DNA, 22 bp, Artificial Sequence
  chemically synthesized
agctcaggactctgagggttgc

SEQ ID NO: 52011 - DNA, 22 bp, Artificial Sequence
  chemically synthesized
aggactctgagggttgctgcgt

SEQ ID NO: 52012 - DNA, 22 bp, Artificial Sequence
  chemically synthesized
tgagggttgctgcgtggaggca

SEQ ID NO: 52013 - DNA, 22 bp, Artificial Sequence
  chemically synthesized
agggttgctgcgtggaggcagt

SEQ ID NO: 52014 - DNA, 22 bp, Artificial Sequence
  chemically synthesized
ctgcgtggaggcagtgcatgcc

SEQ ID NO: 52015 - DNA, 22 bp, Artificial Sequence
  chemically synthesized
cgtggaggcagtgcatgccctg

SEQ ID NO: 52016 - DNA, 22 bp, Artificial Sequence
  chemically synthesized
ggcacagtgcccagttcctgcc

SEQ ID NO: 52017 - DNA, 22 bp, Artificial Sequence
  chemically synthesized
ctgcccacccaggaagtagact

SEQ ID NO: 52018 - DNA, 22 bp, Artificial Sequence
  chemically synthesized
cccacccaggaagtagacttcg

SEQ ID NO: 52019 - DNA, 22 bp, Artificial Sequence
  chemically synthesized
cgggtggaggcagtaggctggg

SEQ ID NO: 52020 - DNA, 22 bp, Artificial Sequence
  chemically synthesized
gggtggaggcagtaggctgggg

SEQ ID NO: 52021 - DNA, 22 bp, Artificial Sequence
  chemically synthesized
gggaggggcggggagcttggac

SEQ ID NO: 52022 - DNA, 22 bp, Artificial Sequence
  chemically synthesized
ggacaggaaggagccttgctca

SEQ ID NO: 52023 - DNA, 22 bp, Artificial Sequence
  chemically synthesized
gacaggaaggagccttgctcat

SEQ ID NO: 52024 - DNA, 22 bp, Artificial Sequence
  chemically synthesized
gctcattgcccggcagacacaa

SEQ ID NO: 52025 - DNA, 22 bp, Artificial Sequence
  chemically synthesized
ctcattgcccggcagacacaag

SEQ ID NO: 52026 - DNA, 22 bp, Artificial Sequence
  chemically synthesized
attgcccggcagacacaagact

SEQ ID NO: 52027 - DNA, 22 bp, Artificial Sequence
  chemically synthesized
cccggcagacacaagactgggc

SEQ ID NO: 52028 - DNA, 22 bp, Artificial Sequence
  chemically synthesized
ggccctcataaactcagacagc

SEQ ID NO: 52029 - DNA, 22 bp, Artificial Sequence
  chemically synthesized
ataaactcagacagcccggcat

SEQ ID NO: 52030 - DNA, 22 bp, Artificial Sequence
  chemically synthesized
agacagcccggcatgtcacctg

SEQ ID NO: 52031 - DNA, 22 bp, Artificial Sequence
  chemically synthesized
ttgtacctgccctttcagctct

SEQ ID NO: 52032 - DNA, 22 bp, Artificial Sequence
  chemically synthesized
tacctgccctttcagctctgtg

SEQ ID NO: 52033 - DNA, 22 bp, Artificial Sequence
  chemically synthesized
ccctttcagctctgtgacccgg

SEQ ID NO: 52034 - DNA, 22 bp, Artificial Sequence
  chemically synthesized
tcagctctgtgacccgggacaa

SEQ ID NO: 52035 - DNA, 22 bp, Artificial Sequence
  chemically synthesized
cagctctgtgacccgggacaag

SEQ ID NO: 52036 - DNA, 22 bp, Artificial Sequence
  chemically synthesized
agctctgtgacccgggacaagt

SEQ ID NO: 52037 - DNA, 22 bp, Artificial Sequence
  chemically synthesized
tgtgacccgggacaagtcaccc

SEQ ID NO: 52038 - DNA, 22 bp, Artificial Sequence
  chemically synthesized
tgacccgggacaagtcaccctc

SEQ ID NO: 52039 - DNA, 22 bp, Artificial Sequence
  chemically synthesized
tccctttgagttgccgcaagag

SEQ ID NO: 52040 - DNA, 22 bp, Artificial Sequence
  chemically synthesized
cctttgagttgccgcaagaggt

SEQ ID NO: 52041 - DNA, 22 bp, Artificial Sequence
  chemically synthesized
tgagttgccgcaagaggtacag

SEQ ID NO: 52042 - DNA, 22 bp, Artificial Sequence
  chemically synthesized
gagttgccgcaagaggtacagt

SEQ ID NO: 52043 - DNA, 22 bp, Artificial Sequence
  chemically synthesized
agttgccgcaagaggtacagtc

SEQ ID NO: 52044 - DNA, 22 bp, Artificial Sequence
  chemically synthesized
ccgcaagaggtacagtcacact

SEQ ID NO: 52045 - DNA, 22 bp, Artificial Sequence
  chemically synthesized
cccagaggattactagaaatga

SEQ ID NO: 52046 - DNA, 22 bp, Artificial Sequence
  chemically synthesized
ctagaaatgacaggcctcgccc

SEQ ID NO: 52047 - DNA, 22 bp, Artificial Sequence
  chemically synthesized
gaaatgacaggcctcgccctcc

SEQ ID NO: 52048 - DNA, 22 bp, Artificial Sequence
  chemically synthesized
gccctcctggcacagacctggc

SEQ ID NO: 52049 - DNA, 22 bp, Artificial Sequence
  chemically synthesized
ctggcacagacctggcaccaat

SEQ ID NO: 52050 - DNA, 22 bp, Artificial Sequence
  chemically synthesized
gcacagacctggcaccaataac

SEQ ID NO: 52051 - DNA, 22 bp, Artificial Sequence
  chemically synthesized
gcaccaataactggcaggtttc

SEQ ID NO: 52052 - DNA, 22 bp, Artificial Sequence
  chemically synthesized
gcaggtttctggggccagctgc

SEQ ID NO: 52053 - DNA, 22 bp, Artificial Sequence
  chemically synthesized
ctggggccagctgcagagggaa

SEQ ID NO: 52054 - DNA, 22 bp, Artificial Sequence
  chemically synthesized
tggggccagctgcagagggaag

SEQ ID NO: 52055 - DNA, 22 bp, Artificial Sequence
  chemically synthesized
gggccagctgcagagggaagag

SEQ ID NO: 52056 - DNA, 22 bp, Artificial Sequence
  chemically synthesized
cagagggaagaggactgagcca

SEQ ID NO: 52057 - DNA, 22 bp, Artificial Sequence
  chemically synthesized
agccacctatgaaatgcccagt

SEQ ID NO: 52058 - DNA, 22 bp, Artificial Sequence
  chemically synthesized
tgaaatgcccagtgggcagccc

SEQ ID NO: 52059 - DNA, 22 bp, Artificial Sequence
  chemically synthesized
ggcaggtctgtgtgcactgggg

SEQ ID NO: 52060 - DNA, 22 bp, Artificial Sequence
  chemically synthesized
tgtgcactggggaggtgtgtgt

SEQ ID NO: 52061 - DNA, 22 bp, Artificial Sequence
  chemically synthesized
gggaggtgtgtgtcataggacc

SEQ ID NO: 52062 - DNA, 22 bp, Artificial Sequence
  chemically synthesized
tgacacacacctccccagtgca

SEQ ID NO: 52063 - DNA, 22 bp, Artificial Sequence
  chemically synthesized
cccagtgcacacagacctgccc

SEQ ID NO: 52064 - DNA, 22 bp, Artificial Sequence
  chemically synthesized
cccaactgtggggctgcccact

SEQ ID NO: 52065 - DNA, 22 bp, Artificial Sequence
  chemically synthesized
tggggctgcccactgggcattt

SEQ ID NO: 52066 - DNA, 22 bp, Artificial Sequence
  chemically synthesized
cccactgggcatttcataggtg

SEQ ID NO: 52067 - DNA, 22 bp, Artificial Sequence
  chemically synthesized
ggcatttcataggtggctcagt

SEQ ID NO: 52068 - DNA, 22 bp, Artificial Sequence
  chemically synthesized
cataggtggctcagtcctcttc

SEQ ID NO: 52069 - DNA, 22 bp, Artificial Sequence
  chemically synthesized
ataggtggctcagtcctcttcc

SEQ ID NO: 52070 - DNA, 22 bp, Artificial Sequence
  chemically synthesized
agtcctcttccctctgcagctg

SEQ ID NO: 52071 - DNA, 22 bp, Artificial Sequence
  chemically synthesized
ttccctctgcagctggccccag

SEQ ID NO: 52072 - DNA, 22 bp, Artificial Sequence
  chemically synthesized
ccctctgcagctggccccagaa

SEQ ID NO: 52073 - DNA, 22 bp, Artificial Sequence
  chemically synthesized
cctctgcagctggccccagaaa

SEQ ID NO: 52074 - DNA, 22 bp, Artificial Sequence
  chemically synthesized
tgcagctggccccagaaacctg

SEQ ID NO: 52075 - DNA, 22 bp, Artificial Sequence
  chemically synthesized
cagctggccccagaaacctgcc

SEQ ID NO: 52076 - DNA, 22 bp, Artificial Sequence
  chemically synthesized
gccccagaaacctgccagttat

SEQ ID NO: 52077 - DNA, 22 bp, Artificial Sequence
  chemically synthesized
ccagttattggtgccaggtctg

SEQ ID NO: 52078 - DNA, 22 bp, Artificial Sequence
  chemically synthesized
ttggtgccaggtctgtgccagg

SEQ ID NO: 52079 - DNA, 22 bp, Artificial Sequence
  chemically synthesized
gtgccaggtctgtgccaggagg

SEQ ID NO: 52080 - DNA, 22 bp, Artificial Sequence
  chemically synthesized
tgccaggagggcgaggcctgtc

SEQ ID NO: 52081 - DNA, 22 bp, Artificial Sequence
  chemically synthesized
tcatttctagtaatcctctggg

SEQ ID NO: 52082 - DNA, 22 bp, Artificial Sequence
  chemically synthesized
ctagtaatcctctgggcagtgt

SEQ ID NO: 52083 - DNA, 22 bp, Artificial Sequence
  chemically synthesized
tagtaatcctctgggcagtgtg

SEQ ID NO: 52084 - DNA, 22 bp, Artificial Sequence
  chemically synthesized
gtaatcctctgggcagtgtgac

SEQ ID NO: 52085 - DNA, 22 bp, Artificial Sequence
  chemically synthesized
tgggcagtgtgactgtacctct

SEQ ID NO: 52086 - DNA, 22 bp, Artificial Sequence
  chemically synthesized
ggcagtgtgactgtacctcttg

SEQ ID NO: 52087 - DNA, 22 bp, Artificial Sequence
  chemically synthesized
tacctcttgcggcaactcaaag

SEQ ID NO: 52088 - DNA, 22 bp, Artificial Sequence
  chemically synthesized
ttgcggcaactcaaagggagag

SEQ ID NO: 52089 - DNA, 22 bp, Artificial Sequence
  chemically synthesized
gcggcaactcaaagggagaggg

SEQ ID NO: 52090 - DNA, 22 bp, Artificial Sequence
  chemically synthesized
cggcaactcaaagggagagggt

SEQ ID NO: 52091 - DNA, 22 bp, Artificial Sequence
  chemically synthesized
aaagggagagggtgacttgtcc

SEQ ID NO: 52092 - DNA, 22 bp, Artificial Sequence
  chemically synthesized
gtcccgggtcacagagctgaaa

SEQ ID NO: 52093 - DNA, 22 bp, Artificial Sequence
  chemically synthesized
tcccgggtcacagagctgaaag

SEQ ID NO: 52094 - DNA, 22 bp, Artificial Sequence
  chemically synthesized
aaagggcaggtacaacaggtga

SEQ ID NO: 52095 - DNA, 22 bp, Artificial Sequence
  chemically synthesized
tctgagtttatgagggcccagt

SEQ ID NO: 52096 - DNA, 22 bp, Artificial Sequence
  chemically synthesized
agtttatgagggcccagtcttg

SEQ ID NO: 52097 - DNA, 22 bp, Artificial Sequence
  chemically synthesized
atgagggcccagtcttgtgtct

SEQ ID NO: 52098 - DNA, 22 bp, Artificial Sequence
  chemically synthesized
tgagggcccagtcttgtgtctg

SEQ ID NO: 52099 - DNA, 22 bp, Artificial Sequence
  chemically synthesized
gtgtctgccgggcaatgagcaa

SEQ ID NO: 52100 - DNA, 22 bp, Artificial Sequence
  chemically synthesized
tgtctgccgggcaatgagcaag

SEQ ID NO: 52101 - DNA, 22 bp, Artificial Sequence
  chemically synthesized
ccgggcaatgagcaaggctcct

SEQ ID NO: 52102 - DNA, 22 bp, Artificial Sequence
  chemically synthesized
cttcctgtccaagctccccgcc

SEQ ID NO: 52103 - DNA, 22 bp, Artificial Sequence
  chemically synthesized
cctgtccaagctccccgcccct

SEQ ID NO: 52104 - DNA, 22 bp, Artificial Sequence
  chemically synthesized
ctgtccaagctccccgcccctc

SEQ ID NO: 52105 - DNA, 22 bp, Artificial Sequence
  chemically synthesized
tccaagctccccgcccctcccc

SEQ ID NO: 52106 - DNA, 22 bp, Artificial Sequence
  chemically synthesized
cccgcccctccccagcctactg

SEQ ID NO: 52107 - DNA, 22 bp, Artificial Sequence
  chemically synthesized
cccagcctactgcctccacccg

SEQ ID NO: 52108 - DNA, 22 bp, Artificial Sequence
  chemically synthesized
ctgcctccacccgaagtctact

SEQ ID NO: 52109 - DNA, 22 bp, Artificial Sequence
  chemically synthesized
cctccacccgaagtctacttcc

SEQ ID NO: 52110 - DNA, 22 bp, Artificial Sequence
  chemically synthesized
cacccgaagtctacttcctggg

SEQ ID NO: 52111 - DNA, 22 bp, Artificial Sequence
  chemically synthesized
cttcctgggtgggcaggaactg

SEQ ID NO: 52112 - DNA, 22 bp, Artificial Sequence
  chemically synthesized
cctgggtgggcaggaactgggc

SEQ ID NO: 52113 - DNA, 22 bp, Artificial Sequence
  chemically synthesized
ctgggtgggcaggaactgggca

SEQ ID NO: 52114 - DNA, 22 bp, Artificial Sequence
  chemically synthesized
ggtgggcaggaactgggcactg

SEQ ID NO: 52115 - DNA, 22 bp, Artificial Sequence
  chemically synthesized
ggcactgtgcccagggcatgca

SEQ ID NO: 52116 - DNA, 22 bp, Artificial Sequence
  chemically synthesized
tgcccagggcatgcactgcctc

SEQ ID NO: 52117 - DNA, 22 bp, Artificial Sequence
  chemically synthesized
cctccacgcagcaaccctcaga

SEQ ID NO: 52118 - DNA, 22 bp, Artificial Sequence
  chemically synthesized
cacgcagcaaccctcagagtcc

SEQ ID NO: 52119 - DNA, 22 bp, Artificial Sequence
  chemically synthesized
agagtcctgagctgaaccaaga

SEQ ID NO: 52120 - DNA, 22 bp, Artificial Sequence
  chemically synthesized
agctgaaccaagaaggaggagg

SEQ ID NO: 52121 - DNA, 22 bp, Artificial Sequence
  chemically synthesized
aaccaagaaggaggagggggtc

SEQ ID NO: 52122 - DNA, 22 bp, Artificial Sequence
  chemically synthesized
cgaggaaggcctagccgctgct

SEQ ID NO: 52123 - DNA, 22 bp, Artificial Sequence
  chemically synthesized
gccgctgctgctgccaggaatt

SEQ ID NO: 52124 - DNA, 22 bp, Artificial Sequence
  chemically synthesized
ctgctgccaggaattccaggtt

SEQ ID NO: 52125 - DNA, 22 bp, Artificial Sequence
  chemically synthesized
ctgccaggaattccaggttgga

SEQ ID NO: 52126 - DNA, 22 bp, Artificial Sequence
  chemically synthesized
ccaggaattccaggttggaggg

SEQ ID NO: 52127 - DNA, 22 bp, Artificial Sequence
  chemically synthesized
caggttggaggggcggcaacct

SEQ ID NO: 52128 - DNA, 22 bp, Artificial Sequence
  chemically synthesized
gaggggcggcaacctcctgcca

SEQ ID NO: 52129 - DNA, 22 bp, Artificial Sequence
  chemically synthesized
ctgccagccttcaggccactct

SEQ ID NO: 52130 - DNA, 22 bp, Artificial Sequence
  chemically synthesized
ccagccttcaggccactctcct

SEQ ID NO: 52131 - DNA, 22 bp, Artificial Sequence
  chemically synthesized
caggccactctcctgtgcctgc

SEQ ID NO: 52132 - DNA, 22 bp, Artificial Sequence
  chemically synthesized
aggccactctcctgtgcctgcc

SEQ ID NO: 52133 - DNA, 22 bp, Artificial Sequence
  chemically synthesized
tcctgtgcctgccagaagagac

SEQ ID NO: 52134 - DNA, 22 bp, Artificial Sequence
  chemically synthesized
ctgtgcctgccagaagagacag

SEQ ID NO: 52135 - DNA, 22 bp, Artificial Sequence
  chemically synthesized
tgcctgccagaagagacagagc

SEQ ID NO: 52136 - DNA, 22 bp, Artificial Sequence
  chemically synthesized
ccagaagagacagagcttgagg

SEQ ID NO: 52137 - DNA, 22 bp, Artificial Sequence
  chemically synthesized
gaggagagcttgaggagagcag

SEQ ID NO: 52138 - DNA, 22 bp, Artificial Sequence
  chemically synthesized
aggagagcttgaggagagcagg

SEQ ID NO: 52139 - DNA, 22 bp, Artificial Sequence
  chemically synthesized
gaggagagcaggaaaggtggga

SEQ ID NO: 52140 - DNA, 22 bp, Artificial Sequence
  chemically synthesized
aggagagcaggaaaggtgggac

SEQ ID NO: 52141 - DNA, 22 bp, Artificial Sequence
  chemically synthesized
ctgctgctgctcactcagttcc

SEQ ID NO: 52142 - DNA, 22 bp, Artificial Sequence
  chemically synthesized
ctgctgctcactcagttccaca

SEQ ID NO: 52143 - DNA, 22 bp, Artificial Sequence
  chemically synthesized
ctgctcactcagttccacaggt

SEQ ID NO: 52144 - DNA, 22 bp, Artificial Sequence
  chemically synthesized
ctcactcagttccacaggtggg

SEQ ID NO: 52145 - DNA, 22 bp, Artificial Sequence
  chemically synthesized
actcagttccacaggtgggagg

SEQ ID NO: 52146 - DNA, 22 bp, Artificial Sequence
  chemically synthesized
agttccacaggtgggagggaca

SEQ ID NO: 52147 - DNA, 22 bp, Artificial Sequence
  chemically synthesized
cacaggtgggagggacagcagg

SEQ ID NO: 52148 - DNA, 22 bp, Artificial Sequence
  chemically synthesized
agagtgggggtcattgtgcaga

SEQ ID NO: 52149 - DNA, 22 bp, Artificial Sequence
  chemically synthesized
gagtgggggtcattgtgcagat

SEQ ID NO: 52150 - DNA, 22 bp, Artificial Sequence
  chemically synthesized
tgcagatgggaaaacaaaggcc

SEQ ID NO: 52151 - DNA, 22 bp, Artificial Sequence
  chemically synthesized
ccgagggcaggcgacctcaacc

SEQ ID NO: 52152 - DNA, 22 bp, Artificial Sequence
  chemically synthesized
aaccacagcccagtgctggagc

SEQ ID NO: 52153 - DNA, 22 bp, Artificial Sequence
  chemically synthesized
gagctgtgagtggatgtagagc

SEQ ID NO: 52154 - DNA, 22 bp, Artificial Sequence
  chemically synthesized
tgagtggatgtagagcagcgga

SEQ ID NO: 52155 - DNA, 22 bp, Artificial Sequence
  chemically synthesized
agccagctcaggggaaggacag

SEQ ID NO: 52156 - DNA, 22 bp, Artificial Sequence
  chemically synthesized
aggggaaggacaggggccctga

SEQ ID NO: 52157 - DNA, 22 bp, Artificial Sequence
  chemically synthesized
aagccaggggatggagctgcag

SEQ ID NO: 52158 - DNA, 22 bp, Artificial Sequence
  chemically synthesized
cagggaagggagctcagagaga

SEQ ID NO: 52159 - DNA, 22 bp, Artificial Sequence
  chemically synthesized
agagagaaggggaggggagtct

SEQ ID NO: 52160 - DNA, 22 bp, Artificial Sequence
  chemically synthesized
agctcagtttcccgctgcctga

SEQ ID NO: 52161 - DNA, 22 bp, Artificial Sequence
  chemically synthesized
agtttcccgctgcctgaaagga

SEQ ID NO: 52162 - DNA, 22 bp, Artificial Sequence
  chemically synthesized
cccgctgcctgaaaggagggtg

SEQ ID NO: 52163 - DNA, 22 bp, Artificial Sequence
  chemically synthesized
ccgctgcctgaaaggagggtgg

SEQ ID NO: 52164 - DNA, 22 bp, Artificial Sequence
  chemically synthesized
cctgaaaggagggtggtaccta

SEQ ID NO: 52165 - DNA, 22 bp, Artificial Sequence
  chemically synthesized
aaaggagggtggtacctactcc

SEQ ID NO: 52166 - DNA, 22 bp, Artificial Sequence
  chemically synthesized
ctcccttcacagggtaactgaa

SEQ ID NO: 52167 - DNA, 22 bp, Artificial Sequence
  chemically synthesized
ccttcacagggtaactgaatga

SEQ ID NO: 52168 - DNA, 22 bp, Artificial Sequence
  chemically synthesized
cacagggtaactgaatgagaga

SEQ ID NO: 52169 - DNA, 22 bp, Artificial Sequence
  chemically synthesized
acagggtaactgaatgagagac

SEQ ID NO: 52170 - DNA, 22 bp, Artificial Sequence
  chemically synthesized
aatgagagactgcctggaggaa

SEQ ID NO: 52171 - DNA, 22 bp, Artificial Sequence
  chemically synthesized
cctggaggaaagctcttcaagt

SEQ ID NO: 52172 - DNA, 22 bp, Artificial Sequence
  chemically synthesized
gaggaaagctcttcaagtgtgg

SEQ ID NO: 52173 - DNA, 22 bp, Artificial Sequence
  chemically synthesized
ttcaagtgtggcccaccccacc

SEQ ID NO: 52174 - DNA, 22 bp, Artificial Sequence
  chemically synthesized
caagtgtggcccaccccacccc

SEQ ID NO: 52175 - DNA, 22 bp, Artificial Sequence
  chemically synthesized
aagtgtggcccaccccacccca

SEQ ID NO: 52176 - DNA, 22 bp, Artificial Sequence
  chemically synthesized
acacgggggagggagggcagca

SEQ ID NO: 52177 - DNA, 22 bp, Artificial Sequence
  chemically synthesized
tctgggcacacccagtacccgt

SEQ ID NO: 52178 - DNA, 22 bp, Artificial Sequence
  chemically synthesized
ctgggcacacccagtacccgtc

SEQ ID NO: 52179 - DNA, 22 bp, Artificial Sequence
  chemically synthesized
tgggcacacccagtacccgtct

SEQ ID NO: 52180 - DNA, 22 bp, Artificial Sequence
  chemically synthesized
ggcacacccagtacccgtctct

SEQ ID NO: 52181 - DNA, 22 bp, Artificial Sequence
  chemically synthesized
tgagctttccttgaactgttgc

SEQ ID NO: 52182 - DNA, 22 bp, Artificial Sequence
  chemically synthesized
agctttccttgaactgttgcat

SEQ ID NO: 52183 - DNA, 22 bp, Artificial Sequence
  chemically synthesized
tccttgaactgttgcattttaa

SEQ ID NO: 52184 - DNA, 22 bp, Artificial Sequence
  chemically synthesized
ccttgaactgttgcattttaat

SEQ ID NO: 52185 - DNA, 22 bp, Artificial Sequence
  chemically synthesized
cttgaactgttgcattttaatc

SEQ ID NO: 52186 - DNA, 22 bp, Artificial Sequence
  chemically synthesized
gaactgttgcattttaatcctc

SEQ ID NO: 52187 - DNA, 22 bp, Artificial Sequence
  chemically synthesized
aactgttgcattttaatcctca

SEQ ID NO: 52188 - DNA, 22 bp, Artificial Sequence
  chemically synthesized
ttgcattttaatcctcacagca

SEQ ID NO: 52189 - DNA, 22 bp, Artificial Sequence
  chemically synthesized
cattttaatcctcacagcagct

SEQ ID NO: 52190 - DNA, 22 bp, Artificial Sequence
  chemically synthesized
taatcctcacagcagctcaaca

SEQ ID NO: 52191 - DNA, 22 bp, Artificial Sequence
  chemically synthesized
aatcctcacagcagctcaacaa

SEQ ID NO: 52192 - DNA, 22 bp, Artificial Sequence
  chemically synthesized
atcctcacagcagctcaacaag

SEQ ID NO: 52193 - DNA, 22 bp, Artificial Sequence
  chemically synthesized
acagcagctcaacaaggtacat

SEQ ID NO: 52194 - DNA, 22 bp, Artificial Sequence
  chemically synthesized
aacaaggtacataccgtcacca

SEQ ID NO: 52195 - DNA, 22 bp, Artificial Sequence
  chemically synthesized
tacagatagggaaattgaggct

SEQ ID NO: 52196 - DNA, 22 bp, Artificial Sequence
  chemically synthesized
acagatagggaaattgaggctc

SEQ ID NO: 52197 - DNA, 22 bp, Artificial Sequence
  chemically synthesized
cagatagggaaattgaggctcg

SEQ ID NO: 52198 - DNA, 22 bp, Artificial Sequence
  chemically synthesized
aggctcggagcggttaaacaac

SEQ ID NO: 52199 - DNA, 22 bp, Artificial Sequence
  chemically synthesized
ggagcggttaaacaactcacct

SEQ ID NO: 52200 - DNA, 22 bp, Artificial Sequence
  chemically synthesized
aacaactcacctgaggcctcac

SEQ ID NO: 52201 - DNA, 22 bp, Artificial Sequence
  chemically synthesized
acctgaggcctcacagccagta

SEQ ID NO: 52202 - DNA, 22 bp, Artificial Sequence
  chemically synthesized
aggcctcacagccagtaagtgg

SEQ ID NO: 52203 - DNA, 22 bp, Artificial Sequence
  chemically synthesized
acagccagtaagtgggttccct

SEQ ID NO: 52204 - DNA, 22 bp, Artificial Sequence
  chemically synthesized
cctggtctgaatgtgtgtgctg

SEQ ID NO: 52205 - DNA, 22 bp, Artificial Sequence
  chemically synthesized
gtctgaatgtgtgtgctggagg

SEQ ID NO: 52206 - DNA, 22 bp, Artificial Sequence
  chemically synthesized
aatgtgtgtgctggaggatcct

SEQ ID NO: 52207 - DNA, 22 bp, Artificial Sequence
  chemically synthesized
gaggatcctgtgggtcactcgc

SEQ ID NO: 52208 - DNA, 22 bp, Artificial Sequence
  chemically synthesized
tgggtcactcgcctggtagagc

SEQ ID NO: 52209 - DNA, 22 bp, Artificial Sequence
  chemically synthesized
gcctggtagagccccaaggtgg

SEQ ID NO: 52210 - DNA, 22 bp, Artificial Sequence
  chemically synthesized
gtagagccccaaggtggaggca

SEQ ID NO: 52211 - DNA, 22 bp, Artificial Sequence
  chemically synthesized
gtgaatgacagaaggggcaaaa

SEQ ID NO: 52212 - DNA, 22 bp, Artificial Sequence
  chemically synthesized
atccattcactctgcaagtatc

SEQ ID NO: 52213 - DNA, 22 bp, Artificial Sequence
  chemically synthesized
actctgcaagtatctacggcac

SEQ ID NO: 52214 - DNA, 22 bp, Artificial Sequence
  chemically synthesized
tgcaagtatctacggcacgtac

SEQ ID NO: 52215 - DNA, 22 bp, Artificial Sequence
  chemically synthesized
caagtatctacggcacgtacgc

SEQ ID NO: 52216 - DNA, 22 bp, Artificial Sequence
  chemically synthesized
cggcacgtacgccagctcccaa

SEQ ID NO: 52217 - DNA, 22 bp, Artificial Sequence
  chemically synthesized
ccaagcaggtttgcgggttgca

SEQ ID NO: 52218 - DNA, 22 bp, Artificial Sequence
  chemically synthesized
gcgggttgcacagcgggcgatg

SEQ ID NO: 52219 - DNA, 22 bp, Artificial Sequence
  chemically synthesized
cgggttgcacagcgggcgatgc

SEQ ID NO: 52220 - DNA, 22 bp, Artificial Sequence
  chemically synthesized
cacagcgggcgatgcaatctga

SEQ ID NO: 52221 - DNA, 22 bp, Artificial Sequence
  chemically synthesized
atttaggcttttaaagggattg

SEQ ID NO: 52222 - DNA, 22 bp, Artificial Sequence
  chemically synthesized
aggcttttaaagggattgcaat

SEQ ID NO: 52223 - DNA, 22 bp, Artificial Sequence
  chemically synthesized
ggcttttaaagggattgcaatc

SEQ ID NO: 52224 - DNA, 22 bp, Artificial Sequence
  chemically synthesized
ttaaagggattgcaatcaagtg

SEQ ID NO: 52225 - DNA, 22 bp, Artificial Sequence
  chemically synthesized
taaagggattgcaatcaagtgg

SEQ ID NO: 52226 - DNA, 22 bp, Artificial Sequence
  chemically synthesized
aaagggattgcaatcaagtggg

SEQ ID NO: 52227 - DNA, 22 bp, Artificial Sequence
  chemically synthesized
aagggattgcaatcaagtgggg

SEQ ID NO: 52228 - DNA, 22 bp, Artificial Sequence
  chemically synthesized
caatcaagtggggccccactag

SEQ ID NO: 52229 - DNA, 22 bp, Artificial Sequence
  chemically synthesized
gcctcaaccctgtacctcccct

SEQ ID NO: 52230 - DNA, 22 bp, Artificial Sequence
  chemically synthesized
aaccctgtacctcccctcccct

SEQ ID NO: 52231 - DNA, 22 bp, Artificial Sequence
  chemically synthesized
tacctcccctcccctccacccc

SEQ ID NO: 52232 - DNA, 22 bp, Artificial Sequence
  chemically synthesized
ccctcccctccacccccagcag

SEQ ID NO: 52233 - DNA, 22 bp, Artificial Sequence
  chemically synthesized
ccctccacccccagcagtctcc

SEQ ID NO: 52234 - DNA, 22 bp, Artificial Sequence
  chemically synthesized
cacccccagcagtctccaaagg

SEQ ID NO: 52235 - DNA, 22 bp, Artificial Sequence
  chemically synthesized
caaaggcctccaacaaccccag

SEQ ID NO: 52236 - DNA, 22 bp, Artificial Sequence
  chemically synthesized
caacaaccccagagtgggggcc

SEQ ID NO: 52237 - DNA, 22 bp, Artificial Sequence
  chemically synthesized
caagctgtatacggatcacact

SEQ ID NO: 52238 - DNA, 22 bp, Artificial Sequence
  chemically synthesized
tatacggatcacactggttttc

SEQ ID NO: 52239 - DNA, 22 bp, Artificial Sequence
  chemically synthesized
gttttccaggagcaaaaacaga

SEQ ID NO: 52240 - DNA, 22 bp, Artificial Sequence
  chemically synthesized
tccaggagcaaaaacagaaaca

SEQ ID NO: 52241 - DNA, 22 bp, Artificial Sequence
  chemically synthesized
ccaggagcaaaaacagaaacag

SEQ ID NO: 52242 - DNA, 22 bp, Artificial Sequence
  chemically synthesized
caggagcaaaaacagaaacagg

SEQ ID NO: 52243 - DNA, 22 bp, Artificial Sequence
  chemically synthesized
aggctggtcaaaattgaacctc

SEQ ID NO: 52244 - DNA, 22 bp, Artificial Sequence
  chemically synthesized
gtcaaaattgaacctcctcctg

SEQ ID NO: 52245 - DNA, 22 bp, Artificial Sequence
  chemically synthesized
aacctcctcctgctctgagcag

SEQ ID NO: 52246 - DNA, 22 bp, Artificial Sequence
  chemically synthesized
ctcctgctctgagcagcctggg

SEQ ID NO: 52247 - DNA, 22 bp, Artificial Sequence
  chemically synthesized
ctgctctgagcagcctgggggg

SEQ ID NO: 52248 - DNA, 22 bp, Artificial Sequence
  chemically synthesized
ctctgagcagcctggggggcag

SEQ ID NO: 52249 - DNA, 22 bp, Artificial Sequence
  chemically synthesized
tgagcagcctggggggcagact

SEQ ID NO: 52250 - DNA, 22 bp, Artificial Sequence
  chemically synthesized
agcagcctggggggcagactaa

SEQ ID NO: 52251 - DNA, 22 bp, Artificial Sequence
  chemically synthesized
gggggcagactaagcagagggc

SEQ ID NO: 52252 - DNA, 22 bp, Artificial Sequence
  chemically synthesized
agcagagggctgtgcagaccca

SEQ ID NO: 52253 - DNA, 22 bp, Artificial Sequence
  chemically synthesized
tgcagacccacataaagagcct

SEQ ID NO: 52254 - DNA, 22 bp, Artificial Sequence
  chemically synthesized
ctgtgtgccaggcacttcaccc

SEQ ID NO: 52255 - DNA, 22 bp, Artificial Sequence
  chemically synthesized
tgtgccaggcacttcacccgag

SEQ ID NO: 52256 - DNA, 22 bp, Artificial Sequence
  chemically synthesized
cacccgaggcacttcacaagca

SEQ ID NO: 52257 - DNA, 22 bp, Artificial Sequence
  chemically synthesized
acccgaggcacttcacaagcat

SEQ ID NO: 52258 - DNA, 22 bp, Artificial Sequence
  chemically synthesized
cacaagcatgcttgggaatgaa

SEQ ID NO: 52259 - DNA, 22 bp, Artificial Sequence
  chemically synthesized
acaagcatgcttgggaatgaaa

SEQ ID NO: 52260 - DNA, 22 bp, Artificial Sequence
  chemically synthesized
gggaatgaaacttccaactctt

SEQ ID NO: 52261 - DNA, 22 bp, Artificial Sequence
  chemically synthesized
ggaatgaaacttccaactcttt

SEQ ID NO: 52262 - DNA, 22 bp, Artificial Sequence
  chemically synthesized
ccaactctttgggatgcaggtg

SEQ ID NO: 52263 - DNA, 22 bp, Artificial Sequence
  chemically synthesized
caactctttgggatgcaggtga

SEQ ID NO: 52264 - DNA, 22 bp, Artificial Sequence
  chemically synthesized
tttgggatgcaggtgaaacagt

SEQ ID NO: 52265 - DNA, 22 bp, Artificial Sequence
  chemically synthesized
tgggatgcaggtgaaacagttc

SEQ ID NO: 52266 - DNA, 22 bp, Artificial Sequence
  chemically synthesized
gggatgcaggtgaaacagttcc

SEQ ID NO: 52267 - DNA, 22 bp, Artificial Sequence
  chemically synthesized
ggatgcaggtgaaacagttcct

SEQ ID NO: 52268 - DNA, 22 bp, Artificial Sequence
  chemically synthesized
ctggttcagagaggtgaagcgg

SEQ ID NO: 52269 - DNA, 22 bp, Artificial Sequence
  chemically synthesized
gttcagagaggtgaagcggcct

SEQ ID NO: 52270 - DNA, 22 bp, Artificial Sequence
  chemically synthesized
agagaggtgaagcggcctgcct

SEQ ID NO: 52271 - DNA, 22 bp, Artificial Sequence
  chemically synthesized
cctgaggcagcacagctcttct

SEQ ID NO: 52272 - DNA, 22 bp, Artificial Sequence
  chemically synthesized
aggcagcacagctcttctttac

SEQ ID NO: 52273 - DNA, 22 bp, Artificial Sequence
  chemically synthesized
ttctttacagatgtgcttcccc

SEQ ID NO: 52274 - DNA, 22 bp, Artificial Sequence
  chemically synthesized
ctttacagatgtgcttccccac

SEQ ID NO: 52275 - DNA, 22 bp, Artificial Sequence
  chemically synthesized
tttacagatgtgcttccccacc

SEQ ID NO: 52276 - DNA, 22 bp, Artificial Sequence
  chemically synthesized
tacagatgtgcttccccacctc

SEQ ID NO: 52277 - DNA, 22 bp, Artificial Sequence
  chemically synthesized
acagatgtgcttccccacctct

SEQ ID NO: 52278 - DNA, 22 bp, Artificial Sequence
  chemically synthesized
cagatgtgcttccccacctcta

SEQ ID NO: 52279 - DNA, 22 bp, Artificial Sequence
  chemically synthesized
ccccacctctaccctgtctcac

SEQ ID NO: 52280 - DNA, 22 bp, Artificial Sequence
  chemically synthesized
cccacctctaccctgtctcacg

SEQ ID NO: 52281 - DNA, 22 bp, Artificial Sequence
  chemically synthesized
taccctgtctcacggcccccca

SEQ ID NO: 52282 - DNA, 22 bp, Artificial Sequence
  chemically synthesized
ccctgtctcacggccccccatg

SEQ ID NO: 52283 - DNA, 22 bp, Artificial Sequence
  chemically synthesized
tctcacggccccccatgccagc

SEQ ID NO: 52284 - DNA, 22 bp, Artificial Sequence
  chemically synthesized
acggccccccatgccagcctga

SEQ ID NO: 52285 - DNA, 22 bp, Artificial Sequence
  chemically synthesized
acggttgtgtctgcctcagtca

SEQ ID NO: 52286 - DNA, 22 bp, Artificial Sequence
  chemically synthesized
tgtctgcctcagtcatgctcca

SEQ ID NO: 52287 - DNA, 22 bp, Artificial Sequence
  chemically synthesized
cctcagtcatgctccatttttc

SEQ ID NO: 52288 - DNA, 22 bp, Artificial Sequence
  chemically synthesized
agtcatgctccatttttccatc

SEQ ID NO: 52289 - DNA, 22 bp, Artificial Sequence
  chemically synthesized
catttttccatcgggaccatca

SEQ ID NO: 52290 - DNA, 22 bp, Artificial Sequence
  chemically synthesized
ttccatcgggaccatcaagagg

SEQ ID NO: 52291 - DNA, 22 bp, Artificial Sequence
  chemically synthesized
tccatcgggaccatcaagaggg

SEQ ID NO: 52292 - DNA, 22 bp, Artificial Sequence
  chemically synthesized
ccatcgggaccatcaagagggt

SEQ ID NO: 52293 - DNA, 22 bp, Artificial Sequence
  chemically synthesized
catcgggaccatcaagagggtg

SEQ ID NO: 52294 - DNA, 22 bp, Artificial Sequence
  chemically synthesized
gtgtctaaggctgactgggtaa

SEQ ID NO: 52295 - DNA, 22 bp, Artificial Sequence
  chemically synthesized
tgtctaaggctgactgggtaac

SEQ ID NO: 52296 - DNA, 22 bp, Artificial Sequence
  chemically synthesized
aggctgactgggtaactttgga

SEQ ID NO: 52297 - DNA, 22 bp, Artificial Sequence
  chemically synthesized
actgggtaactttggatgagcg

SEQ ID NO: 52298 - DNA, 22 bp, Artificial Sequence
  chemically synthesized
ggtaactttggatgagcggtct

SEQ ID NO: 52299 - DNA, 22 bp, Artificial Sequence
  chemically synthesized
tggatgagcggtctctccgctc

SEQ ID NO: 52300 - DNA, 22 bp, Artificial Sequence
  chemically synthesized
ggatgagcggtctctccgctct

SEQ ID NO: 52301 - DNA, 22 bp, Artificial Sequence
  chemically synthesized
gatgagcggtctctccgctctg

SEQ ID NO: 52302 - DNA, 22 bp, Artificial Sequence
  chemically synthesized
tccgctctgagcctgtttcctc

SEQ ID NO: 52303 - DNA, 22 bp, Artificial Sequence
  chemically synthesized
cgctctgagcctgtttcctcat

SEQ ID NO: 52304 - DNA, 22 bp, Artificial Sequence
  chemically synthesized
tgagcctgtttcctcatctgtc

SEQ ID NO: 52305 - DNA, 22 bp, Artificial Sequence
  chemically synthesized
agcctgtttcctcatctgtcaa

SEQ ID NO: 52306 - DNA, 22 bp, Artificial Sequence
  chemically synthesized
tttcctcatctgtcaaatgggc

SEQ ID NO: 52307 - DNA, 22 bp, Artificial Sequence
  chemically synthesized
cctcatctgtcaaatgggctct

SEQ ID NO: 52308 - DNA, 22 bp, Artificial Sequence
  chemically synthesized
ctcatctgtcaaatgggctcta

SEQ ID NO: 52309 - DNA, 22 bp, Artificial Sequence
  chemically synthesized
atctgtcaaatgggctctaacc

SEQ ID NO: 52310 - DNA, 22 bp, Artificial Sequence
  chemically synthesized
tcaaatgggctctaacccactc

SEQ ID NO: 52311 - DNA, 22 bp, Artificial Sequence
  chemically synthesized
taacccactctgatctcccagg

SEQ ID NO: 52312 - DNA, 22 bp, Artificial Sequence
  chemically synthesized
acccactctgatctcccagggc

SEQ ID NO: 52313 - DNA, 22 bp, Artificial Sequence
  chemically synthesized
tgatctcccagggcggcagtaa

SEQ ID NO: 52314 - DNA, 22 bp, Artificial Sequence
  chemically synthesized
atctcccagggcggcagtaagt

SEQ ID NO: 52315 - DNA, 22 bp, Artificial Sequence
  chemically synthesized
ccagggcggcagtaagtcttca

SEQ ID NO: 52316 - DNA, 22 bp, Artificial Sequence
  chemically synthesized
cagcatcaggcattttggggtg

SEQ ID NO: 52317 - DNA, 22 bp, Artificial Sequence
  chemically synthesized
agcatcaggcattttggggtga

SEQ ID NO: 52318 - DNA, 22 bp, Artificial Sequence
  chemically synthesized
tggggtgactcagtaaatggta

SEQ ID NO: 52319 - DNA, 22 bp, Artificial Sequence
  chemically synthesized
ggggtgactcagtaaatggtag

SEQ ID NO: 52320 - DNA, 22 bp, Artificial Sequence
  chemically synthesized
gggtgactcagtaaatggtaga

SEQ ID NO: 52321 - DNA, 22 bp, Artificial Sequence
  chemically synthesized
agtaaatggtagatcttgctac

SEQ ID NO: 52322 - DNA, 22 bp, Artificial Sequence
  chemically synthesized
gctaccagtggaacagccacta

SEQ ID NO: 52323 - DNA, 22 bp, Artificial Sequence
  chemically synthesized
ctaccagtggaacagccactaa

SEQ ID NO: 52324 - DNA, 22 bp, Artificial Sequence
  chemically synthesized
ccagtggaacagccactaagga

SEQ ID NO: 52325 - DNA, 22 bp, Artificial Sequence
  chemically synthesized
aggattctgcagtgagagcaga

SEQ ID NO: 52326 - DNA, 22 bp, Artificial Sequence
  chemically synthesized
tgcagtgagagcagagggccag

SEQ ID NO: 52327 - DNA, 22 bp, Artificial Sequence
  chemically synthesized
cagtgagagcagagggccagct

SEQ ID NO: 52328 - DNA, 22 bp, Artificial Sequence
  chemically synthesized
agtggtactctcccagagactg

SEQ ID NO: 52329 - DNA, 22 bp, Artificial Sequence
  chemically synthesized
tcccagagactgtctgactcac

SEQ ID NO: 52330 - DNA, 22 bp, Artificial Sequence
  chemically synthesized
ccagagactgtctgactcacgc

SEQ ID NO: 52331 - DNA, 22 bp, Artificial Sequence
  chemically synthesized
tctgactcacgccaccccctcc

SEQ ID NO: 52332 - DNA, 22 bp, Artificial Sequence
  chemically synthesized
actcacgccaccccctccacct

SEQ ID NO: 52333 - DNA, 22 bp, Artificial Sequence
  chemically synthesized
acgccaccccctccaccttgga

SEQ ID NO: 52334 - DNA, 22 bp, Artificial Sequence
  chemically synthesized
caccttggacacaggacgctgt

SEQ ID NO: 52335 - DNA, 22 bp, Artificial Sequence
  chemically synthesized
ggacacaggacgctgtggtttc

SEQ ID NO: 52336 - DNA, 22 bp, Artificial Sequence
  chemically synthesized
gacacaggacgctgtggtttct

SEQ ID NO: 52337 - DNA, 22 bp, Artificial Sequence
  chemically synthesized
tggtttctgagccaggtacaat

SEQ ID NO: 52338 - DNA, 22 bp, Artificial Sequence
  chemically synthesized
ctgagccaggtacaatgactcc

SEQ ID NO: 52339 - DNA, 22 bp, Artificial Sequence
  chemically synthesized
tgagccaggtacaatgactcct

SEQ ID NO: 52340 - DNA, 22 bp, Artificial Sequence
  chemically synthesized
agccaggtacaatgactccttt

SEQ ID NO: 52341 - DNA, 22 bp, Artificial Sequence
  chemically synthesized
ctttcggtaagtgcagtggaag

SEQ ID NO: 52342 - DNA, 22 bp, Artificial Sequence
  chemically synthesized
tcggtaagtgcagtggaagctg

SEQ ID NO: 52343 - DNA, 22 bp, Artificial Sequence
  chemically synthesized
cggtaagtgcagtggaagctgt

SEQ ID NO: 52344 - DNA, 22 bp, Artificial Sequence
  chemically synthesized
ggtaagtgcagtggaagctgta

SEQ ID NO: 52345 - DNA, 22 bp, Artificial Sequence
  chemically synthesized
tacactgcccaggcaaagcgtc

SEQ ID NO: 52346 - DNA, 22 bp, Artificial Sequence
  chemically synthesized
cccaggcaaagcgtccgggcag

SEQ ID NO: 52347 - DNA, 22 bp, Artificial Sequence
  chemically synthesized
agatcccagccagtggacttag

SEQ ID NO: 52348 - DNA, 22 bp, Artificial Sequence
  chemically synthesized
agcccctgtttgctcctccgat

SEQ ID NO: 52349 - DNA, 22 bp, Artificial Sequence
  chemically synthesized
gcccctgtttgctcctccgata

SEQ ID NO: 52350 - DNA, 22 bp, Artificial Sequence
  chemically synthesized
tttgctcctccgataactgggg

SEQ ID NO: 52351 - DNA, 22 bp, Artificial Sequence
  chemically synthesized
gctcctccgataactggggtga

SEQ ID NO: 52352 - DNA, 22 bp, Artificial Sequence
  chemically synthesized
ctcctccgataactggggtgac

SEQ ID NO: 52353 - DNA, 22 bp, Artificial Sequence
  chemically synthesized
ctccgataactggggtgacctt

SEQ ID NO: 52354 - DNA, 22 bp, Artificial Sequence
  chemically synthesized
cgataactggggtgaccttggt

SEQ ID NO: 52355 - DNA, 22 bp, Artificial Sequence
  chemically synthesized
gggtgaccttggttaatattca

SEQ ID NO: 52356 - DNA, 22 bp, Artificial Sequence
  chemically synthesized
ggttaatattcaccagcagcct

SEQ ID NO: 52357 - DNA, 22 bp, Artificial Sequence
  chemically synthesized
gttaatattcaccagcagcctc

SEQ ID NO: 52358 - DNA, 22 bp, Artificial Sequence
  chemically synthesized
atattcaccagcagcctccccc

SEQ ID NO: 52359 - DNA, 22 bp, Artificial Sequence
  chemically synthesized
accagcagcctcccccgttgcc

SEQ ID NO: 52360 - DNA, 22 bp, Artificial Sequence
  chemically synthesized
ccccgttgcccctctggatcca

SEQ ID NO: 52361 - DNA, 22 bp, Artificial Sequence
  chemically synthesized
cccctctggatccactgcttaa

SEQ ID NO: 52362 - DNA, 22 bp, Artificial Sequence
  chemically synthesized
tggatccactgcttaaatacgg

SEQ ID NO: 52363 - DNA, 22 bp, Artificial Sequence
  chemically synthesized
gatccactgcttaaatacggac

SEQ ID NO: 52364 - DNA, 22 bp, Artificial Sequence
  chemically synthesized
cttaaatacggacgaggacagg

SEQ ID NO: 52365 - DNA, 22 bp, Artificial Sequence
  chemically synthesized
aaatacggacgaggacagggcc

SEQ ID NO: 52366 - DNA, 22 bp, Artificial Sequence
  chemically synthesized
aatacggacgaggacagggccc

SEQ ID NO: 52367 - DNA, 22 bp, Artificial Sequence
  chemically synthesized
tctcctcagcttcaggcaccac

SEQ ID NO: 52368 - DNA, 22 bp, Artificial Sequence
  chemically synthesized
ctcagcttcaggcaccaccact

SEQ ID NO: 52369 - DNA, 22 bp, Artificial Sequence
  chemically synthesized
agcttcaggcaccaccactgac

SEQ ID NO: 52370 - DNA, 22 bp, Artificial Sequence
  chemically synthesized
caggcaccaccactgacctggg

SEQ ID NO: 52371 - DNA, 22 bp, Artificial Sequence
  chemically synthesized
aggcaccaccactgacctggga

SEQ ID NO: 52372 - DNA, 22 bp, Artificial Sequence
  chemically synthesized
acctgggacagtgaatcgtaag

SEQ ID NO: 52373 - DNA, 22 bp, Artificial Sequence
  chemically synthesized
ggacagtgaatcgtaagtatgc

SEQ ID NO: 52374 - DNA, 22 bp, Artificial Sequence
  chemically synthesized
tcactgcgagaggttctggaga

SEQ ID NO: 52375 - DNA, 22 bp, Artificial Sequence
  chemically synthesized
cactgcgagaggttctggagag

SEQ ID NO: 52376 - DNA, 22 bp, Artificial Sequence
  chemically synthesized
actgcgagaggttctggagagg

SEQ ID NO: 52377 - DNA, 22 bp, Artificial Sequence
  chemically synthesized
cgagaggttctggagaggcttc

SEQ ID NO: 52378 - DNA, 22 bp, Artificial Sequence
  chemically synthesized
tggagaggcttctgagctcccc

SEQ ID NO: 52379 - DNA, 22 bp, Artificial Sequence
  chemically synthesized
gagaggcttctgagctccccat

SEQ ID NO: 52380 - DNA, 22 bp, Artificial Sequence
  chemically synthesized
ctgagctccccatggcccaggc

SEQ ID NO: 52381 - DNA, 22 bp, Artificial Sequence
  chemically synthesized
tgagctccccatggcccaggca

SEQ ID NO: 52382 - DNA, 22 bp, Artificial Sequence
  chemically synthesized
agctccccatggcccaggcagg

SEQ ID NO: 52383 - DNA, 22 bp, Artificial Sequence
  chemically synthesized
cccatggcccaggcaggcagca

SEQ ID NO: 52384 - DNA, 22 bp, Artificial Sequence
  chemically synthesized
gggcaggaggggggttgtggag

SEQ ID NO: 52385 - DNA, 22 bp, Artificial Sequence
  chemically synthesized
tggagtgggtatccgcctgctg

SEQ ID NO: 52386 - DNA, 22 bp, Artificial Sequence
  chemically synthesized
ctgaggtgcagggcagatggag

SEQ ID NO: 52387 - DNA, 22 bp, Artificial Sequence
  chemically synthesized
aggtgcagggcagatggagagg

SEQ ID NO: 52388 - DNA, 22 bp, Artificial Sequence
  chemically synthesized
cagctgagctcctattttcata

SEQ ID NO: 52389 - DNA, 22 bp, Artificial Sequence
  chemically synthesized
agctcctattttcataataaca

SEQ ID NO: 52390 - DNA, 22 bp, Artificial Sequence
  chemically synthesized
ctattttcataataacagcagc

SEQ ID NO: 52391 - DNA, 22 bp, Artificial Sequence
  chemically synthesized
ttttcataataacagcagccat

SEQ ID NO: 52392 - DNA, 22 bp, Artificial Sequence
  chemically synthesized
tcataataacagcagccatgag

SEQ ID NO: 52393 - DNA, 22 bp, Artificial Sequence
  chemically synthesized
cataataacagcagccatgagg

SEQ ID NO: 52394 - DNA, 22 bp, Artificial Sequence
  chemically synthesized
ataataacagcagccatgaggg

SEQ ID NO: 52395 - DNA, 22 bp, Artificial Sequence
  chemically synthesized
tgtcctgtttcccagtcctgcc

SEQ ID NO: 52396 - DNA, 22 bp, Artificial Sequence
  chemically synthesized
tttcccagtcctgcccggtccc

SEQ ID NO: 52397 - DNA, 22 bp, Artificial Sequence
  chemically synthesized
cccagtcctgcccggtcccccc

SEQ ID NO: 52398 - DNA, 22 bp, Artificial Sequence
  chemically synthesized
ccagtcctgcccggtcccccct

SEQ ID NO: 52399 - DNA, 22 bp, Artificial Sequence
  chemically synthesized
cccggtcccccctcggtacctc

SEQ ID NO: 52400 - DNA, 22 bp, Artificial Sequence
  chemically synthesized
ggtacctcctggtggatacact

SEQ ID NO: 52401 - DNA, 22 bp, Artificial Sequence
  chemically synthesized
ctggtggatacactggttcctg

SEQ ID NO: 52402 - DNA, 22 bp, Artificial Sequence
  chemically synthesized
gtggatacactggttcctgtaa

SEQ ID NO: 52403 - DNA, 22 bp, Artificial Sequence
  chemically synthesized
gttcctgtaagcagaagtggat

SEQ ID NO: 52404 - DNA, 22 bp, Artificial Sequence
  chemically synthesized
ctgtaagcagaagtggatgagg

SEQ ID NO: 52405 - DNA, 22 bp, Artificial Sequence
  chemically synthesized
taagcagaagtggatgagggtg

SEQ ID NO: 52406 - DNA, 22 bp, Artificial Sequence
  chemically synthesized
ggtctgcagtcctggcacccca

SEQ ID NO: 52407 - DNA, 22 bp, Artificial Sequence
  chemically synthesized
cagtcctggcaccccaggatgg

SEQ ID NO: 52408 - DNA, 22 bp, Artificial Sequence
  chemically synthesized
gcaccccaggatgggggacacc

SEQ ID NO: 52409 - DNA, 22 bp, Artificial Sequence
  chemically synthesized
ctttctgtttgcacagctcctc

SEQ ID NO: 52410 - DNA, 22 bp, Artificial Sequence
  chemically synthesized
tttctgtttgcacagctcctct

SEQ ID NO: 52411 - DNA, 22 bp, Artificial Sequence
  chemically synthesized
tctgtttgcacagctcctctgt

SEQ ID NO: 52412 - DNA, 22 bp, Artificial Sequence
  chemically synthesized
ctgtttgcacagctcctctgtc

SEQ ID NO: 52413 - DNA, 22 bp, Artificial Sequence
  chemically synthesized
tgtttgcacagctcctctgtct

SEQ ID NO: 52414 - DNA, 22 bp, Artificial Sequence
  chemically synthesized
tttgcacagctcctctgtctgt

SEQ ID NO: 52415 - DNA, 22 bp, Artificial Sequence
  chemically synthesized
gcacagctcctctgtctgtcgg

SEQ ID NO: 52416 - DNA, 22 bp, Artificial Sequence
  chemically synthesized
cacagctcctctgtctgtcggg

SEQ ID NO: 52417 - DNA, 22 bp, Artificial Sequence
  chemically synthesized
ctctgtctgtcgggggctcctg

SEQ ID NO: 52418 - DNA, 22 bp, Artificial Sequence
  chemically synthesized
tgtctgtcgggggctcctgtct

SEQ ID NO: 52419 - DNA, 22 bp, Artificial Sequence
  chemically synthesized
tctgtcgggggctcctgtctgt

SEQ ID NO: 52420 - DNA, 22 bp, Artificial Sequence
  chemically synthesized
tcgggggctcctgtctgttgtc

SEQ ID NO: 52421 - DNA, 22 bp, Artificial Sequence
  chemically synthesized
ctgtctgttgtctcctataagc

SEQ ID NO: 52422 - DNA, 22 bp, Artificial Sequence
  chemically synthesized
tctgttgtctcctataagcctc

SEQ ID NO: 52423 - DNA, 22 bp, Artificial Sequence
  chemically synthesized
ttgtctcctataagcctcacca

SEQ ID NO: 52424 - DNA, 22 bp, Artificial Sequence
  chemically synthesized
tctcctataagcctcaccacct

SEQ ID NO: 52425 - DNA, 22 bp, Artificial Sequence
  chemically synthesized
ctataagcctcaccacctctcc

SEQ ID NO: 52426 - DNA, 22 bp, Artificial Sequence
  chemically synthesized
taagcctcaccacctctcctac

SEQ ID NO: 52427 - DNA, 22 bp, Artificial Sequence
  chemically synthesized
accacctctcctactgcttggg

SEQ ID NO: 52428 - DNA, 22 bp, Artificial Sequence
  chemically synthesized
tcctactgcttgggcatgcatc

SEQ ID NO: 52429 - DNA, 22 bp, Artificial Sequence
  chemically synthesized
ctactgcttgggcatgcatctt

SEQ ID NO: 52430 - DNA, 22 bp, Artificial Sequence
  chemically synthesized
ctgcttgggcatgcatctttct

SEQ ID NO: 52431 - DNA, 22 bp, Artificial Sequence
  chemically synthesized
cttgggcatgcatctttctccc

SEQ ID NO: 52432 - DNA, 22 bp, Artificial Sequence
  chemically synthesized
gggcatgcatctttctcccctt

SEQ ID NO: 52433 - DNA, 22 bp, Artificial Sequence
  chemically synthesized
ggcatgcatctttctccccttc

SEQ ID NO: 52434 - DNA, 22 bp, Artificial Sequence
  chemically synthesized
tctccccttctatagatgagga

SEQ ID NO: 52435 - DNA, 22 bp, Artificial Sequence
  chemically synthesized
ctccccttctatagatgaggag

SEQ ID NO: 52436 - DNA, 22 bp, Artificial Sequence
  chemically synthesized
tccccttctatagatgaggagg

SEQ ID NO: 52437 - DNA, 22 bp, Artificial Sequence
  chemically synthesized
cccttctatagatgaggaggtt

SEQ ID NO: 52438 - DNA, 22 bp, Artificial Sequence
  chemically synthesized
ctatagatgaggaggttaaggt

SEQ ID NO: 52439 - DNA, 22 bp, Artificial Sequence
  chemically synthesized
tatagatgaggaggttaaggtc

SEQ ID NO: 52440 - DNA, 22 bp, Artificial Sequence
  chemically synthesized
tagatgaggaggttaaggtcca

SEQ ID NO: 52441 - DNA, 22 bp, Artificial Sequence
  chemically synthesized
aggtccagagaggggtggggag

SEQ ID NO: 52442 - DNA, 22 bp, Artificial Sequence
  chemically synthesized
acattctccatcccctccagat

SEQ ID NO: 52443 - DNA, 22 bp, Artificial Sequence
  chemically synthesized
tccatcccctccagatatgacc

SEQ ID NO: 52444 - DNA, 22 bp, Artificial Sequence
  chemically synthesized
catcccctccagatatgaccag

SEQ ID NO: 52445 - DNA, 22 bp, Artificial Sequence
  chemically synthesized
cagatatgaccaggaacagacc

SEQ ID NO: 52446 - DNA, 20 bp, Artificial Sequence
  chemically synthesized
cgagcgagccgcgatgacaa

SEQ ID NO: 52447 - DNA, 20 bp, Artificial Sequence
  chemically synthesized
tcccatcaacatttctgtgc

SEQ ID NO: 52448 - DNA, 20 bp, Artificial Sequence
  chemically synthesized
tgctggactccttccactcg

SEQ ID NO: 52449 - DNA, 20 bp, Artificial Sequence
  chemically synthesized
gctggactccttccactcgc

SEQ ID NO: 52450 - DNA, 20 bp, Artificial Sequence
  chemically synthesized
ttccactcgcgggtcgtctc

SEQ ID NO: 52451 - DNA, 20 bp, Artificial Sequence
  chemically synthesized
ccactcgcgggtcgtctcca

SEQ ID NO: 52452 - DNA, 20 bp, Artificial Sequence
  chemically synthesized
cgcgggtcgtctccagagct

SEQ ID NO: 52453 - DNA, 20 bp, Artificial Sequence
  chemically synthesized
gtctccagagctcagaaaat

SEQ ID NO: 52454 - DNA, 20 bp, Artificial Sequence
  chemically synthesized
tctccagagctcagaaaatg

SEQ ID NO: 52455 - DNA, 20 bp, Artificial Sequence
  chemically synthesized
agctcagaaaatgaggtgat

SEQ ID NO: 52456 - DNA, 20 bp, Artificial Sequence
  chemically synthesized
tcagaaaatgaggtgatcag

SEQ ID NO: 52457 - DNA, 20 bp, Artificial Sequence
  chemically synthesized
cagaaaatgaggtgatcagt

SEQ ID NO: 52458 - DNA, 20 bp, Artificial Sequence
  chemically synthesized
aatgaggtgatcagtgggac

SEQ ID NO: 52459 - DNA, 20 bp, Artificial Sequence
  chemically synthesized
aggtgatcagtgggacgagt

SEQ ID NO: 52460 - DNA, 20 bp, Artificial Sequence
  chemically synthesized
ggtgatcagtgggacgagta

SEQ ID NO: 52461 - DNA, 20 bp, Artificial Sequence
  chemically synthesized
gatcagtgggacgagtaagg

SEQ ID NO: 52462 - DNA, 20 bp, Artificial Sequence
  chemically synthesized
atcagtgggacgagtaagga

SEQ ID NO: 52463 - DNA, 20 bp, Artificial Sequence
  chemically synthesized
tcagtgggacgagtaaggaa

SEQ ID NO: 52464 - DNA, 20 bp, Artificial Sequence
  chemically synthesized
cagtgggacgagtaaggaag

SEQ ID NO: 52465 - DNA, 20 bp, Artificial Sequence
  chemically synthesized
agtgggacgagtaaggaagg

SEQ ID NO: 52466 - DNA, 20 bp, Artificial Sequence
  chemically synthesized
gtgggacgagtaaggaaggg

SEQ ID NO: 52467 - DNA, 20 bp, Artificial Sequence
  chemically synthesized
gacgagtaaggaaggggggt

SEQ ID NO: 52468 - DNA, 20 bp, Artificial Sequence
  chemically synthesized
acgagtaaggaaggggggtt

SEQ ID NO: 52469 - DNA, 20 bp, Artificial Sequence
  chemically synthesized
gagtaaggaaggggggttgg

SEQ ID NO: 52470 - DNA, 20 bp, Artificial Sequence
  chemically synthesized
gtaaggaaggggggttggga

SEQ ID NO: 52471 - DNA, 20 bp, Artificial Sequence
  chemically synthesized
taaggaaggggggttgggag

SEQ ID NO: 52472 - DNA, 20 bp, Artificial Sequence
  chemically synthesized
aaggaaggggggttgggaga

SEQ ID NO: 52473 - DNA, 20 bp, Artificial Sequence
  chemically synthesized
aggaaggggggttgggagag

SEQ ID NO: 52474 - DNA, 20 bp, Artificial Sequence
  chemically synthesized
ggggttgggagaggggcgat

SEQ ID NO: 52475 - DNA, 20 bp, Artificial Sequence
  chemically synthesized
gggttgggagaggggcgatt

SEQ ID NO: 52476 - DNA, 20 bp, Artificial Sequence
  chemically synthesized
agaggggcgattgggcaacc

SEQ ID NO: 52477 - DNA, 20 bp, Artificial Sequence
  chemically synthesized
gcaacccggctgcacaaaca

SEQ ID NO: 52478 - DNA, 20 bp, Artificial Sequence
  chemically synthesized
caacccggctgcacaaacac

SEQ ID NO: 52479 - DNA, 20 bp, Artificial Sequence
  chemically synthesized
acccggctgcacaaacacgg

SEQ ID NO: 52480 - DNA, 20 bp, Artificial Sequence
  chemically synthesized
cccggctgcacaaacacggg

SEQ ID NO: 52481 - DNA, 20 bp, Artificial Sequence
  chemically synthesized
tgcacaaacacgggaggtca

SEQ ID NO: 52482 - DNA, 20 bp, Artificial Sequence
  chemically synthesized
gggaggtcaaagattgcgcc

SEQ ID NO: 52483 - DNA, 20 bp, Artificial Sequence
  chemically synthesized
aagattgcgcccagcccgcc

SEQ ID NO: 52484 - DNA, 20 bp, Artificial Sequence
  chemically synthesized
agattgcgcccagcccgccc

SEQ ID NO: 52485 - DNA, 20 bp, Artificial Sequence
  chemically synthesized
tgcgcccagcccgcccaggc

SEQ ID NO: 52486 - DNA, 20 bp, Artificial Sequence
  chemically synthesized
gcgcccagcccgcccaggcc

SEQ ID NO: 52487 - DNA, 20 bp, Artificial Sequence
  chemically synthesized
cagcccgcccaggccgggaa

SEQ ID NO: 52488 - DNA, 20 bp, Artificial Sequence
  chemically synthesized
cccaggccgggaatggaata

SEQ ID NO: 52489 - DNA, 20 bp, Artificial Sequence
  chemically synthesized
ccaggccgggaatggaataa

SEQ ID NO: 52490 - DNA, 20 bp, Artificial Sequence
  chemically synthesized
caggccgggaatggaataaa

SEQ ID NO: 52491 - DNA, 20 bp, Artificial Sequence
  chemically synthesized
gggaatggaataaagggacg

SEQ ID NO: 52492 - DNA, 20 bp, Artificial Sequence
  chemically synthesized
ggaatggaataaagggacgc

SEQ ID NO: 52493 - DNA, 20 bp, Artificial Sequence
  chemically synthesized
gaatggaataaagggacgcg

SEQ ID NO: 52494 - DNA, 20 bp, Artificial Sequence
  chemically synthesized
aataaagggacgcggggcgc

SEQ ID NO: 52495 - DNA, 20 bp, Artificial Sequence
  chemically synthesized
taaagggacgcggggcgccg

SEQ ID NO: 52496 - DNA, 20 bp, Artificial Sequence
  chemically synthesized
aaagggacgcggggcgccgg

SEQ ID NO: 52497 - DNA, 20 bp, Artificial Sequence
  chemically synthesized
gcggggcgccggaggctgca

SEQ ID NO: 52498 - DNA, 20 bp, Artificial Sequence
  chemically synthesized
gggcgccggaggctgcacag

SEQ ID NO: 52499 - DNA, 20 bp, Artificial Sequence
  chemically synthesized
gccggaggctgcacagaagc

SEQ ID NO: 52500 - DNA, 20 bp, Artificial Sequence
  chemically synthesized
gtccgactgtgctcgctgct

SEQ ID NO: 52501 - DNA, 20 bp, Artificial Sequence
  chemically synthesized
tcgctgctcagcgccgcacc

SEQ ID NO: 52502 - DNA, 20 bp, Artificial Sequence
  chemically synthesized
ctgctcagcgccgcacccgg

SEQ ID NO: 52503 - DNA, 20 bp, Artificial Sequence
  chemically synthesized
cagcgccgcacccggaagat

SEQ ID NO: 52504 - DNA, 20 bp, Artificial Sequence
  chemically synthesized
agcgccgcacccggaagatg

SEQ ID NO: 52505 - DNA, 20 bp, Artificial Sequence
  chemically synthesized
ccggaagatgaggctcgccg

SEQ ID NO: 52506 - DNA, 20 bp, Artificial Sequence
  chemically synthesized
cggaagatgaggctcgccgt

SEQ ID NO: 52507 - DNA, 20 bp, Artificial Sequence
  chemically synthesized
gaagatgaggctcgccgtgg

SEQ ID NO: 52508 - DNA, 20 bp, Artificial Sequence
  chemically synthesized
gctcgccgtgggagccctgc

SEQ ID NO: 52509 - DNA, 20 bp, Artificial Sequence
  chemically synthesized
cctgctggtctgcgccgtcc

SEQ ID NO: 52510 - DNA, 20 bp, Artificial Sequence
  chemically synthesized
ctgctggtctgcgccgtcct

SEQ ID NO: 52511 - DNA, 20 bp, Artificial Sequence
  chemically synthesized
tggtctgcgccgtcctgggt

SEQ ID NO: 52512 - DNA, 20 bp, Artificial Sequence
  chemically synthesized
tgcgccgtcctgggtgagtg

SEQ ID NO: 52513 - DNA, 20 bp, Artificial Sequence
  chemically synthesized
gcgccgtcctgggtgagtgc

SEQ ID NO: 52514 - DNA, 20 bp, Artificial Sequence
  chemically synthesized
gtcctgggtgagtgcgggca

SEQ ID NO: 52515 - DNA, 20 bp, Artificial Sequence
  chemically synthesized
tcctgggtgagtgcgggcac

SEQ ID NO: 52516 - DNA, 20 bp, Artificial Sequence
  chemically synthesized
cctgggtgagtgcgggcacg

SEQ ID NO: 52517 - DNA, 20 bp, Artificial Sequence
  chemically synthesized
gggtgagtgcgggcacgggg

SEQ ID NO: 52518 - DNA, 20 bp, Artificial Sequence
  chemically synthesized
gcgggcacggggtagcaccg

SEQ ID NO: 52519 - DNA, 20 bp, Artificial Sequence
  chemically synthesized
gggcacggggtagcaccgca

SEQ ID NO: 52520 - DNA, 20 bp, Artificial Sequence
  chemically synthesized
gggtagcaccgcagagtcgc

SEQ ID NO: 52521 - DNA, 20 bp, Artificial Sequence
  chemically synthesized
cccgcgcgttccctgcaacc

SEQ ID NO: 52522 - DNA, 20 bp, Artificial Sequence
  chemically synthesized
ccgcgcgttccctgcaaccc

SEQ ID NO: 52523 - DNA, 20 bp, Artificial Sequence
  chemically synthesized
cgcgttccctgcaacccggg

SEQ ID NO: 52524 - DNA, 20 bp, Artificial Sequence
  chemically synthesized
caacccgggcggccaccgcg

SEQ ID NO: 52525 - DNA, 20 bp, Artificial Sequence
  chemically synthesized
gcctgcatgcactccgcgct

SEQ ID NO: 52526 - DNA, 20 bp, Artificial Sequence
  chemically synthesized
cctgcatgcactccgcgctc

SEQ ID NO: 52527 - DNA, 20 bp, Artificial Sequence
  chemically synthesized
catgcactccgcgctcaggc

SEQ ID NO: 52528 - DNA, 20 bp, Artificial Sequence
  chemically synthesized
gcactccgcgctcaggctgg

SEQ ID NO: 52529 - DNA, 20 bp, Artificial Sequence
  chemically synthesized
ccgcgctcaggctggaagcc

SEQ ID NO: 52530 - DNA, 20 bp, Artificial Sequence
  chemically synthesized
cgcgctcaggctggaagcct

SEQ ID NO: 52531 - DNA, 20 bp, Artificial Sequence
  chemically synthesized
aggctggaagcctgggtgtc

SEQ ID NO: 52532 - DNA, 20 bp, Artificial Sequence
  chemically synthesized
ggctggaagcctgggtgtct

SEQ ID NO: 52533 - DNA, 20 bp, Artificial Sequence
  chemically synthesized
gcctctctacgccccacccc

SEQ ID NO: 52534 - DNA, 20 bp, Artificial Sequence
  chemically synthesized
ccccacccctggcctttgct

SEQ ID NO: 52535 - DNA, 20 bp, Artificial Sequence
  chemically synthesized
cccacccctggcctttgctt

SEQ ID NO: 52536 - DNA, 20 bp, Artificial Sequence
  chemically synthesized
ctggcctttgcttgggcttc

SEQ ID NO: 52537 - DNA, 20 bp, Artificial Sequence
  chemically synthesized
tccccctcctcctctttgtc

SEQ ID NO: 52538 - DNA, 20 bp, Artificial Sequence
  chemically synthesized
tctttgtccagtaaatcttg

SEQ ID NO: 52539 - DNA, 20 bp, Artificial Sequence
  chemically synthesized
ttgtccagtaaatcttgcag

SEQ ID NO: 52540 - DNA, 20 bp, Artificial Sequence
  chemically synthesized
agcagtgaaatacaataaat

SEQ ID NO: 52541 - DNA, 20 bp, Artificial Sequence
  chemically synthesized
cagtgaaatacaataaatca

SEQ ID NO: 52542 - DNA, 20 bp, Artificial Sequence
  chemically synthesized
taaatcagagcacgtctaac

SEQ ID NO: 52543 - DNA, 20 bp, Artificial Sequence
  chemically synthesized
aaatcagagcacgtctaacc

SEQ ID NO: 52544 - DNA, 20 bp, Artificial Sequence
  chemically synthesized
ctttgctgctgcctcttgtc

SEQ ID NO: 52545 - DNA, 20 bp, Artificial Sequence
  chemically synthesized
cttgtcaagtccgaactcct

SEQ ID NO: 52546 - DNA, 20 bp, Artificial Sequence
  chemically synthesized
caagtccgaactccttagca

SEQ ID NO: 52547 - DNA, 20 bp, Artificial Sequence
  chemically synthesized
aactccttagcatggcattc

SEQ ID NO: 52548 - DNA, 20 bp, Artificial Sequence
  chemically synthesized
actccttagcatggcattca

SEQ ID NO: 52549 - DNA, 20 bp, Artificial Sequence
  chemically synthesized
gcatggcattcaaggcctcc

SEQ ID NO: 52550 - DNA, 20 bp, Artificial Sequence
  chemically synthesized
catggcattcaaggcctccc

SEQ ID NO: 52551 - DNA, 20 bp, Artificial Sequence
  chemically synthesized
gggtctgaccattccccttt

SEQ ID NO: 52552 - DNA, 20 bp, Artificial Sequence
  chemically synthesized
gtctgaccattcccctttca

SEQ ID NO: 52553 - DNA, 20 bp, Artificial Sequence
  chemically synthesized
tctgaccattcccctttcag

SEQ ID NO: 52554 - DNA, 20 bp, Artificial Sequence
  chemically synthesized
tttcagaggctgatgtcccc

SEQ ID NO: 52555 - DNA, 20 bp, Artificial Sequence
  chemically synthesized
ttcagaggctgatgtcccct

SEQ ID NO: 52556 - DNA, 20 bp, Artificial Sequence
  chemically synthesized
ctgatgtcccctgggtgccc

SEQ ID NO: 52557 - DNA, 20 bp, Artificial Sequence
  chemically synthesized
tgatgtcccctgggtgccct

SEQ ID NO: 52558 - DNA, 20 bp, Artificial Sequence
  chemically synthesized
atgtcccctgggtgccctgg

SEQ ID NO: 52559 - DNA, 20 bp, Artificial Sequence
  chemically synthesized
cctgggtgccctgggagctg

SEQ ID NO: 52560 - DNA, 20 bp, Artificial Sequence
  chemically synthesized
ggagctgtagatgtcctgcc

SEQ ID NO: 52561 - DNA, 20 bp, Artificial Sequence
  chemically synthesized
gagctgtagatgtcctgcca

SEQ ID NO: 52562 - DNA, 20 bp, Artificial Sequence
  chemically synthesized
ctgtagatgtcctgccaagg

SEQ ID NO: 52563 - DNA, 20 bp, Artificial Sequence
  chemically synthesized
tagatgtcctgccaaggaag

SEQ ID NO: 52564 - DNA, 20 bp, Artificial Sequence
  chemically synthesized
gccaaggaagcggtgccatc

SEQ ID NO: 52565 - DNA, 20 bp, Artificial Sequence
  chemically synthesized
aaggaagcggtgccatcgag

SEQ ID NO: 52566 - DNA, 20 bp, Artificial Sequence
  chemically synthesized
aagcggtgccatcgagcggt

SEQ ID NO: 52567 - DNA, 20 bp, Artificial Sequence
  chemically synthesized
gcggtgccatcgagcggtca

SEQ ID NO: 52568 - DNA, 20 bp, Artificial Sequence
  chemically synthesized
gccatcgagcggtcagagca

SEQ ID NO: 52569 - DNA, 20 bp, Artificial Sequence
  chemically synthesized
ccatcgagcggtcagagcat

SEQ ID NO: 52570 - DNA, 20 bp, Artificial Sequence
  chemically synthesized
catcgagcggtcagagcatg

SEQ ID NO: 52571 - DNA, 20 bp, Artificial Sequence
  chemically synthesized
cggtcagagcatggggtttg

SEQ ID NO: 52572 - DNA, 20 bp, Artificial Sequence
  chemically synthesized
cagagcatggggtttgaagc

SEQ ID NO: 52573 - DNA, 20 bp, Artificial Sequence
  chemically synthesized
gggtttgaagccagacttct

SEQ ID NO: 52574 - DNA, 20 bp, Artificial Sequence
  chemically synthesized
aagccagacttcttggatcc

SEQ ID NO: 52575 - DNA, 20 bp, Artificial Sequence
  chemically synthesized
gacttcttggatccaagtcc

SEQ ID NO: 52576 - DNA, 20 bp, Artificial Sequence
  chemically synthesized
tcttggatccaagtcctggc

SEQ ID NO: 52577 - DNA, 20 bp, Artificial Sequence
  chemically synthesized
agtcctggccggctcctcac

SEQ ID NO: 52578 - DNA, 20 bp, Artificial Sequence
  chemically synthesized
gtcctggccggctcctcacc

SEQ ID NO: 52579 - DNA, 20 bp, Artificial Sequence
  chemically synthesized
tcctggccggctcctcacca

SEQ ID NO: 52580 - DNA, 20 bp, Artificial Sequence
  chemically synthesized
ctggccggctcctcaccagg

SEQ ID NO: 52581 - DNA, 20 bp, Artificial Sequence
  chemically synthesized
tggccggctcctcaccaggg

SEQ ID NO: 52582 - DNA, 20 bp, Artificial Sequence
  chemically synthesized
ggccggctcctcaccaggga

SEQ ID NO: 52583 - DNA, 20 bp, Artificial Sequence
  chemically synthesized
gccggctcctcaccagggag

SEQ ID NO: 52584 - DNA, 20 bp, Artificial Sequence
  chemically synthesized
ccggctcctcaccagggagg

SEQ ID NO: 52585 - DNA, 20 bp, Artificial Sequence
  chemically synthesized
caccagggagggggtcatca

SEQ ID NO: 52586 - DNA, 20 bp, Artificial Sequence
  chemically synthesized
gggtcatcacagcacttgcc

SEQ ID NO: 52587 - DNA, 20 bp, Artificial Sequence
  chemically synthesized
ggtcatcacagcacttgcct

SEQ ID NO: 52588 - DNA, 20 bp, Artificial Sequence
  chemically synthesized
tcatcacagcacttgcctgg

SEQ ID NO: 52589 - DNA, 20 bp, Artificial Sequence
  chemically synthesized
catcacagcacttgcctggg

SEQ ID NO: 52590 - DNA, 20 bp, Artificial Sequence
  chemically synthesized
atcacagcacttgcctggga

SEQ ID NO: 52591 - DNA, 20 bp, Artificial Sequence
  chemically synthesized
cttgcctgggagggtcaaat

SEQ ID NO: 52592 - DNA, 20 bp, Artificial Sequence
  chemically synthesized
ttgcctgggagggtcaaatg

SEQ ID NO: 52593 - DNA, 20 bp, Artificial Sequence
  chemically synthesized
tgcctgggagggtcaaatga

SEQ ID NO: 52594 - DNA, 20 bp, Artificial Sequence
  chemically synthesized
tgggagggtcaaatgagggt

SEQ ID NO: 52595 - DNA, 20 bp, Artificial Sequence
  chemically synthesized
agggtcaaatgagggtcagc

SEQ ID NO: 52596 - DNA, 20 bp, Artificial Sequence
  chemically synthesized
gggtcaaatgagggtcagcg

SEQ ID NO: 52597 - DNA, 20 bp, Artificial Sequence
  chemically synthesized
tcaaatgagggtcagcgagg

SEQ ID NO: 52598 - DNA, 20 bp, Artificial Sequence
  chemically synthesized
aatgagggtcagcgaggtgg

SEQ ID NO: 52599 - DNA, 20 bp, Artificial Sequence
  chemically synthesized
tcagcgaggtggcagatgct

SEQ ID NO: 52600 - DNA, 20 bp, Artificial Sequence
  chemically synthesized
aggtggcagatgctgagtac

SEQ ID NO: 52601 - DNA, 20 bp, Artificial Sequence
  chemically synthesized
tggcagatgctgagtaccag

SEQ ID NO: 52602 - DNA, 20 bp, Artificial Sequence
  chemically synthesized
cagatgctgagtaccagtgg

SEQ ID NO: 52603 - DNA, 20 bp, Artificial Sequence
  chemically synthesized
atgttgcacacatcctgcta

SEQ ID NO: 52604 - DNA, 20 bp, Artificial Sequence
  chemically synthesized
tgttgcacacatcctgctat

SEQ ID NO: 52605 - DNA, 20 bp, Artificial Sequence
  chemically synthesized
gttgcacacatcctgctatg

SEQ ID NO: 52606 - DNA, 20 bp, Artificial Sequence
  chemically synthesized
gcacacatcctgctatgggg

SEQ ID NO: 52607 - DNA, 20 bp, Artificial Sequence
  chemically synthesized
cacatcctgctatggggcag

SEQ ID NO: 52608 - DNA, 20 bp, Artificial Sequence
  chemically synthesized
gccacactccccgacctcct

SEQ ID NO: 52609 - DNA, 20 bp, Artificial Sequence
  chemically synthesized
ccacactccccgacctcctg

SEQ ID NO: 52610 - DNA, 20 bp, Artificial Sequence
  chemically synthesized
cactccccgacctcctgagg

SEQ ID NO: 52611 - DNA, 20 bp, Artificial Sequence
  chemically synthesized
actccccgacctcctgaggt

SEQ ID NO: 52612 - DNA, 20 bp, Artificial Sequence
  chemically synthesized
ctccccgacctcctgaggtg

SEQ ID NO: 52613 - DNA, 20 bp, Artificial Sequence
  chemically synthesized
taacttctgcctgccattca

SEQ ID NO: 52614 - DNA, 20 bp, Artificial Sequence
  chemically synthesized
aacttctgcctgccattcat

SEQ ID NO: 52615 - DNA, 20 bp, Artificial Sequence
  chemically synthesized
acttctgcctgccattcatg

SEQ ID NO: 52616 - DNA, 20 bp, Artificial Sequence
  chemically synthesized
tggggcatttgtcacactgt

SEQ ID NO: 52617 - DNA, 20 bp, Artificial Sequence
  chemically synthesized
ggggcatttgtcacactgtt

SEQ ID NO: 52618 - DNA, 20 bp, Artificial Sequence
  chemically synthesized
gggcatttgtcacactgttg

SEQ ID NO: 52619 - DNA, 20 bp, Artificial Sequence
  chemically synthesized
actgttggggcttccacgtt

SEQ ID NO: 52620 - DNA, 20 bp, Artificial Sequence
  chemically synthesized
gtttagttttctctccccat

SEQ ID NO: 52621 - DNA, 20 bp, Artificial Sequence
  chemically synthesized
agttttctctccccataagc

SEQ ID NO: 52622 - DNA, 20 bp, Artificial Sequence
  chemically synthesized
ccataagctagcaattcctt

SEQ ID NO: 52623 - DNA, 20 bp, Artificial Sequence
  chemically synthesized
ataagctagcaattccttga

SEQ ID NO: 52624 - DNA, 20 bp, Artificial Sequence
  chemically synthesized
aagctagcaattccttgaga

SEQ ID NO: 52625 - DNA, 20 bp, Artificial Sequence
  chemically synthesized
agctagcaattccttgagag

SEQ ID NO: 52626 - DNA, 20 bp, Artificial Sequence
  chemically synthesized
tacttgcctttatccccgca

SEQ ID NO: 52627 - DNA, 20 bp, Artificial Sequence
  chemically synthesized
cttgcctttatccccgcaca

SEQ ID NO: 52628 - DNA, 20 bp, Artificial Sequence
  chemically synthesized
tccccgcacagagcacttca

SEQ ID NO: 52629 - DNA, 20 bp, Artificial Sequence
  chemically synthesized
ccccgcacagagcacttcac

SEQ ID NO: 52630 - DNA, 20 bp, Artificial Sequence
  chemically synthesized
gagcacttcacaggctgtgc

SEQ ID NO: 52631 - DNA, 20 bp, Artificial Sequence
  chemically synthesized
agcacttcacaggctgtgca

SEQ ID NO: 52632 - DNA, 20 bp, Artificial Sequence
  chemically synthesized
gtgcaaggtaatgctccact

SEQ ID NO: 52633 - DNA, 20 bp, Artificial Sequence
  chemically synthesized
tgcaaggtaatgctccactg

SEQ ID NO: 52634 - DNA, 20 bp, Artificial Sequence
  chemically synthesized
tgaggacacattctcgccta

SEQ ID NO: 52635 - DNA, 20 bp, Artificial Sequence
  chemically synthesized
gaggacacattctcgcctat

SEQ ID NO: 52636 - DNA, 20 bp, Artificial Sequence
  chemically synthesized
attctcgcctatgggaactc

SEQ ID NO: 52637 - DNA, 20 bp, Artificial Sequence
  chemically synthesized
tctcgcctatgggaactctg

SEQ ID NO: 52638 - DNA, 20 bp, Artificial Sequence
  chemically synthesized
ctcgcctatgggaactctgg

SEQ ID NO: 52639 - DNA, 20 bp, Artificial Sequence
  chemically synthesized
gcctatgggaactctggagg

SEQ ID NO: 52640 - DNA, 20 bp, Artificial Sequence
  chemically synthesized
cctatgggaactctggaggc

SEQ ID NO: 52641 - DNA, 20 bp, Artificial Sequence
  chemically synthesized
ctatgggaactctggaggca

SEQ ID NO: 52642 - DNA, 20 bp, Artificial Sequence
  chemically synthesized
actctggaggcagggctttg

SEQ ID NO: 52643 - DNA, 20 bp, Artificial Sequence
  chemically synthesized
tctggaggcagggctttgtg

SEQ ID NO: 52644 - DNA, 20 bp, Artificial Sequence
  chemically synthesized
ctggaggcagggctttgtgg

SEQ ID NO: 52645 - DNA, 20 bp, Artificial Sequence
  chemically synthesized
tggaggcagggctttgtgga

SEQ ID NO: 52646 - DNA, 20 bp, Artificial Sequence
  chemically synthesized
ggaggcagggctttgtggag

SEQ ID NO: 52647 - DNA, 20 bp, Artificial Sequence
  chemically synthesized
gctttgtggaggggctgcca

SEQ ID NO: 52648 - DNA, 20 bp, Artificial Sequence
  chemically synthesized
ctttgtggaggggctgccac

SEQ ID NO: 52649 - DNA, 20 bp, Artificial Sequence
  chemically synthesized
cacaggcttatgttgcctcc

SEQ ID NO: 52650 - DNA, 20 bp, Artificial Sequence
  chemically synthesized
acaggcttatgttgcctcct

SEQ ID NO: 52651 - DNA, 20 bp, Artificial Sequence
  chemically synthesized
ttgcctcctaggatttccca

SEQ ID NO: 52652 - DNA, 20 bp, Artificial Sequence
  chemically synthesized
tgcctcctaggatttcccat

SEQ ID NO: 52653 - DNA, 20 bp, Artificial Sequence
  chemically synthesized
cctaggatttcccatgggcc

SEQ ID NO: 52654 - DNA, 20 bp, Artificial Sequence
  chemically synthesized
taggatttcccatgggccaa

SEQ ID NO: 52655 - DNA, 20 bp, Artificial Sequence
  chemically synthesized
aggatttcccatgggccaag

SEQ ID NO: 52656 - DNA, 20 bp, Artificial Sequence
  chemically synthesized
ggatttcccatgggccaaga

SEQ ID NO: 52657 - DNA, 20 bp, Artificial Sequence
  chemically synthesized
ccatgggccaagagggaaaa

SEQ ID NO: 52658 - DNA, 20 bp, Artificial Sequence
  chemically synthesized
catgggccaagagggaaaat

SEQ ID NO: 52659 - DNA, 20 bp, Artificial Sequence
  chemically synthesized
atgggccaagagggaaaatg

SEQ ID NO: 52660 - DNA, 20 bp, Artificial Sequence
  chemically synthesized
tgggccaagagggaaaatgg

SEQ ID NO: 52661 - DNA, 20 bp, Artificial Sequence
  chemically synthesized
agagggaaaatgggggtcgc

SEQ ID NO: 52662 - DNA, 20 bp, Artificial Sequence
  chemically synthesized
gagggaaaatgggggtcgct

SEQ ID NO: 52663 - DNA, 20 bp, Artificial Sequence
  chemically synthesized
agggaaaatgggggtcgctg

SEQ ID NO: 52664 - DNA, 20 bp, Artificial Sequence
  chemically synthesized
gaaaatgggggtcgctgggg

SEQ ID NO: 52665 - DNA, 20 bp, Artificial Sequence
  chemically synthesized
gtcgctggggtggccatccc

SEQ ID NO: 52666 - DNA, 20 bp, Artificial Sequence
  chemically synthesized
gctggggtggccatccctgg

SEQ ID NO: 52667 - DNA, 20 bp, Artificial Sequence
  chemically synthesized
tggcccctcctcatgcatcc

SEQ ID NO: 52668 - DNA, 20 bp, Artificial Sequence
  chemically synthesized
gcccctcctcatgcatcctg

SEQ ID NO: 52669 - DNA, 20 bp, Artificial Sequence
  chemically synthesized
ccctcctcatgcatcctgga

SEQ ID NO: 52670 - DNA, 20 bp, Artificial Sequence
  chemically synthesized
tcatgcatcctggagagctg

SEQ ID NO: 52671 - DNA, 20 bp, Artificial Sequence
  chemically synthesized
catgcatcctggagagctgt

SEQ ID NO: 52672 - DNA, 20 bp, Artificial Sequence
  chemically synthesized
agctgtgggcctcctctcca

SEQ ID NO: 52673 - DNA, 20 bp, Artificial Sequence
  chemically synthesized
gctgtgggcctcctctccac

SEQ ID NO: 52674 - DNA, 20 bp, Artificial Sequence
  chemically synthesized
cctcctctccacaggctttg

SEQ ID NO: 52675 - DNA, 20 bp, Artificial Sequence
  chemically synthesized
caggctttgtggatcttctt

SEQ ID NO: 52676 - DNA, 20 bp, Artificial Sequence
  chemically synthesized
ggctttgtggatcttcttca

SEQ ID NO: 52677 - DNA, 20 bp, Artificial Sequence
  chemically synthesized
ttgtggatcttcttcagagc

SEQ ID NO: 52678 - DNA, 20 bp, Artificial Sequence
  chemically synthesized
ggatcttcttcagagccagt

SEQ ID NO: 52679 - DNA, 20 bp, Artificial Sequence
  chemically synthesized
cttcttcagagccagtgagt

SEQ ID NO: 52680 - DNA, 20 bp, Artificial Sequence
  chemically synthesized
ccagtgagtcagccttgctg

SEQ ID NO: 52681 - DNA, 20 bp, Artificial Sequence
  chemically synthesized
gtgagtcagccttgctgtgg

SEQ ID NO: 52682 - DNA, 20 bp, Artificial Sequence
  chemically synthesized
gccttgctgtggtggcccac

SEQ ID NO: 52683 - DNA, 20 bp, Artificial Sequence
  chemically synthesized
ccttgctgtggtggcccaca

SEQ ID NO: 52684 - DNA, 20 bp, Artificial Sequence
  chemically synthesized
ttgctgtggtggcccacaag

SEQ ID NO: 52685 - DNA, 20 bp, Artificial Sequence
  chemically synthesized
ctgtggtggcccacaaggag

SEQ ID NO: 52686 - DNA, 20 bp, Artificial Sequence
  chemically synthesized
gtggtggcccacaaggagtg

SEQ ID NO: 52687 - DNA, 20 bp, Artificial Sequence
  chemically synthesized
cccacaaggagtggagatga

SEQ ID NO: 52688 - DNA, 20 bp, Artificial Sequence
  chemically synthesized
cacaaggagtggagatgaca

SEQ ID NO: 52689 - DNA, 20 bp, Artificial Sequence
  chemically synthesized
acaaggagtggagatgacag

SEQ ID NO: 52690 - DNA, 20 bp, Artificial Sequence
  chemically synthesized
caaggagtggagatgacaga

SEQ ID NO: 52691 - DNA, 20 bp, Artificial Sequence
  chemically synthesized
gtggagatgacagagggcct

SEQ ID NO: 52692 - DNA, 20 bp, Artificial Sequence
  chemically synthesized
tggagatgacagagggcctt

SEQ ID NO: 52693 - DNA, 20 bp, Artificial Sequence
  chemically synthesized
ggagatgacagagggccttg

SEQ ID NO: 52694 - DNA, 20 bp, Artificial Sequence
  chemically synthesized
atgacagagggccttgggga

SEQ ID NO: 52695 - DNA, 20 bp, Artificial Sequence
  chemically synthesized
tgacagagggccttggggac

SEQ ID NO: 52696 - DNA, 20 bp, Artificial Sequence
  chemically synthesized
gacagagggccttggggaca

SEQ ID NO: 52697 - DNA, 20 bp, Artificial Sequence
  chemically synthesized
gggccttggggacagggcaa

SEQ ID NO: 52698 - DNA, 20 bp, Artificial Sequence
  chemically synthesized
cagggcaaaagctcatgtga

SEQ ID NO: 52699 - DNA, 20 bp, Artificial Sequence
  chemically synthesized
agggcaaaagctcatgtgat

SEQ ID NO: 52700 - DNA, 20 bp, Artificial Sequence
  chemically synthesized
gggcaaaagctcatgtgata

SEQ ID NO: 52701 - DNA, 20 bp, Artificial Sequence
  chemically synthesized
atgctgtctctgcaaccaca

SEQ ID NO: 52702 - DNA, 20 bp, Artificial Sequence
  chemically synthesized
tgcaaccacatggattttaa

SEQ ID NO: 52703 - DNA, 20 bp, Artificial Sequence
  chemically synthesized
tggattttaatagttaccca

SEQ ID NO: 52704 - DNA, 20 bp, Artificial Sequence
  chemically synthesized
ttttaatagttacccatggc

SEQ ID NO: 52705 - DNA, 20 bp, Artificial Sequence
  chemically synthesized
tagttacccatggctggctt

SEQ ID NO: 52706 - DNA, 20 bp, Artificial Sequence
  chemically synthesized
gcttcagctttttttgtgaa

SEQ ID NO: 52707 - DNA, 20 bp, Artificial Sequence
  chemically synthesized
tcagctttttttgtgaatgg

SEQ ID NO: 52708 - DNA, 20 bp, Artificial Sequence
  chemically synthesized
ttttgtgaatggcagccaaa

SEQ ID NO: 52709 - DNA, 20 bp, Artificial Sequence
  chemically synthesized
tgaatggcagccaaaaagtg

SEQ ID NO: 52710 - DNA, 20 bp, Artificial Sequence
  chemically synthesized
gccaaaaagtgtggtgaaaa

SEQ ID NO: 52711 - DNA, 20 bp, Artificial Sequence
  chemically synthesized
caaaaagtgtggtgaaaatg

SEQ ID NO: 52712 - DNA, 20 bp, Artificial Sequence
  chemically synthesized
aaaaagtgtggtgaaaatgg

SEQ ID NO: 52713 - DNA, 20 bp, Artificial Sequence
  chemically synthesized
aaaagtgtggtgaaaatgga

SEQ ID NO: 52714 - DNA, 20 bp, Artificial Sequence
  chemically synthesized
gtgtggtgaaaatggaggga

SEQ ID NO: 52715 - DNA, 20 bp, Artificial Sequence
  chemically synthesized
gtgaaaatggagggatagtt

SEQ ID NO: 52716 - DNA, 20 bp, Artificial Sequence
  chemically synthesized
aaaatggagggatagttcag

SEQ ID NO: 52717 - DNA, 20 bp, Artificial Sequence
  chemically synthesized
aatggagggatagttcagtg

SEQ ID NO: 52718 - DNA, 20 bp, Artificial Sequence
  chemically synthesized
gagggatagttcagtggaga

SEQ ID NO: 52719 - DNA, 20 bp, Artificial Sequence
  chemically synthesized
gggatagttcagtggagaca

SEQ ID NO: 52720 - DNA, 20 bp, Artificial Sequence
  chemically synthesized
ggatagttcagtggagacag

SEQ ID NO: 52721 - DNA, 20 bp, Artificial Sequence
  chemically synthesized
gatagttcagtggagacaga

SEQ ID NO: 52722 - DNA, 20 bp, Artificial Sequence
  chemically synthesized
atagttcagtggagacagag

SEQ ID NO: 52723 - DNA, 20 bp, Artificial Sequence
  chemically synthesized
agttcagtggagacagaggg

SEQ ID NO: 52724 - DNA, 20 bp, Artificial Sequence
  chemically synthesized
aggggagactgttgaatttg

SEQ ID NO: 52725 - DNA, 20 bp, Artificial Sequence
  chemically synthesized
gggagactgttgaatttgtg

SEQ ID NO: 52726 - DNA, 20 bp, Artificial Sequence
  chemically synthesized
tgttgaatttgtggagtttt

SEQ ID NO: 52727 - DNA, 20 bp, Artificial Sequence
  chemically synthesized
agtttttagttcttcctaaa

SEQ ID NO: 52728 - DNA, 20 bp, Artificial Sequence
  chemically synthesized
tttttagttcttcctaaaca

SEQ ID NO: 52729 - DNA, 20 bp, Artificial Sequence
  chemically synthesized
tttagttcttcctaaacaga

SEQ ID NO: 52730 - DNA, 20 bp, Artificial Sequence
  chemically synthesized
tcttcctaaacagagagcaa

SEQ ID NO: 52731 - DNA, 20 bp, Artificial Sequence
  chemically synthesized
ctaaacagagagcaacagac

SEQ ID NO: 52732 - DNA, 20 bp, Artificial Sequence
  chemically synthesized
aaacagagagcaacagacaa

SEQ ID NO: 52733 - DNA, 20 bp, Artificial Sequence
  chemically synthesized
agagcaacagacaagagtta

SEQ ID NO: 52734 - DNA, 20 bp, Artificial Sequence
  chemically synthesized
gttaatttaccctcaactac

SEQ ID NO: 52735 - DNA, 20 bp, Artificial Sequence
  chemically synthesized
tttaccctcaactactggcc

SEQ ID NO: 52736 - DNA, 20 bp, Artificial Sequence
  chemically synthesized
accctcaactactggccaag

SEQ ID NO: 52737 - DNA, 20 bp, Artificial Sequence
  chemically synthesized
ccctcaactactggccaaga

SEQ ID NO: 52738 - DNA, 20 bp, Artificial Sequence
  chemically synthesized
cctcaactactggccaagaa

SEQ ID NO: 52739 - DNA, 20 bp, Artificial Sequence
  chemically synthesized
ctcaactactggccaagaag

SEQ ID NO: 52740 - DNA, 20 bp, Artificial Sequence
  chemically synthesized
ggccaagaaggggtgtaact

SEQ ID NO: 52741 - DNA, 20 bp, Artificial Sequence
  chemically synthesized
gttttcttcttttgtgccct

SEQ ID NO: 52742 - DNA, 20 bp, Artificial Sequence
  chemically synthesized
ttcttcttttgtgccctgag

SEQ ID NO: 52743 - DNA, 20 bp, Artificial Sequence
  chemically synthesized
ttcttttgtgccctgagtag

SEQ ID NO: 52744 - DNA, 20 bp, Artificial Sequence
  chemically synthesized
tgtgccctgagtagcagacc

SEQ ID NO: 52745 - DNA, 20 bp, Artificial Sequence
  chemically synthesized
tgccctgagtagcagaccca

SEQ ID NO: 52746 - DNA, 20 bp, Artificial Sequence
  chemically synthesized
tgagtagcagacccagagtc

SEQ ID NO: 52747 - DNA, 20 bp, Artificial Sequence
  chemically synthesized
agtagcagacccagagtctg

SEQ ID NO: 52748 - DNA, 20 bp, Artificial Sequence
  chemically synthesized
agacccagagtctggagacc

SEQ ID NO: 52749 - DNA, 20 bp, Artificial Sequence
  chemically synthesized
gagtctggagacccagattc

SEQ ID NO: 52750 - DNA, 20 bp, Artificial Sequence
  chemically synthesized
agtctggagacccagattct

SEQ ID NO: 52751 - DNA, 20 bp, Artificial Sequence
  chemically synthesized
ggagacccagattctaggcc

SEQ ID NO: 52752 - DNA, 20 bp, Artificial Sequence
  chemically synthesized
cccagattctaggcctggct

SEQ ID NO: 52753 - DNA, 20 bp, Artificial Sequence
  chemically synthesized
ggcctggcttggccaacgac

SEQ ID NO: 52754 - DNA, 20 bp, Artificial Sequence
  chemically synthesized
ctggcttggccaacgacaag

SEQ ID NO: 52755 - DNA, 20 bp, Artificial Sequence
  chemically synthesized
tggcttggccaacgacaagc

SEQ ID NO: 52756 - DNA, 20 bp, Artificial Sequence
  chemically synthesized
ggcttggccaacgacaagca

SEQ ID NO: 52757 - DNA, 20 bp, Artificial Sequence
  chemically synthesized
aacgacaagcagggtgacct

SEQ ID NO: 52758 - DNA, 20 bp, Artificial Sequence
  chemically synthesized
acgacaagcagggtgacctt

SEQ ID NO: 52759 - DNA, 20 bp, Artificial Sequence
  chemically synthesized
ccttgggttaaaaaaaaaaa

SEQ ID NO: 52760 - DNA, 20 bp, Artificial Sequence
  chemically synthesized
cttgggttaaaaaaaaaaaa

SEQ ID NO: 52761 - DNA, 20 bp, Artificial Sequence
  chemically synthesized
aaaaaaaggcatcattctct

SEQ ID NO: 52762 - DNA, 20 bp, Artificial Sequence
  chemically synthesized
tctcactccctcttctcaaa

SEQ ID NO: 52763 - DNA, 20 bp, Artificial Sequence
  chemically synthesized
actccctcttctcaaaaaga

SEQ ID NO: 52764 - DNA, 20 bp, Artificial Sequence
  chemically synthesized
gatggcaattcctcccccgc

SEQ ID NO: 52765 - DNA, 20 bp, Artificial Sequence
  chemically synthesized
cctcccccgctggttttcca

SEQ ID NO: 52766 - DNA, 20 bp, Artificial Sequence
  chemically synthesized
cccgctggttttccatagtt

SEQ ID NO: 52767 - DNA, 20 bp, Artificial Sequence
  chemically synthesized
ccgctggttttccatagttg

SEQ ID NO: 52768 - DNA, 20 bp, Artificial Sequence
  chemically synthesized
ctggttttccatagttgagg

SEQ ID NO: 52769 - DNA, 20 bp, Artificial Sequence
  chemically synthesized
ttttccatagttgaggtagc

SEQ ID NO: 52770 - DNA, 20 bp, Artificial Sequence
  chemically synthesized
gaggtagcaagccaatgtgt

SEQ ID NO: 52771 - DNA, 20 bp, Artificial Sequence
  chemically synthesized
aggtagcaagccaatgtgtt

SEQ ID NO: 52772 - DNA, 20 bp, Artificial Sequence
  chemically synthesized
ggtagcaagccaatgtgttg

SEQ ID NO: 52773 - DNA, 20 bp, Artificial Sequence
  chemically synthesized
agcaagccaatgtgttgggg

SEQ ID NO: 52774 - DNA, 20 bp, Artificial Sequence
  chemically synthesized
gaaaacgccctgtgcatact

SEQ ID NO: 52775 - DNA, 20 bp, Artificial Sequence
  chemically synthesized
aaaacgccctgtgcatactg

SEQ ID NO: 52776 - DNA, 20 bp, Artificial Sequence
  chemically synthesized
atactgaggcttatgttcca

SEQ ID NO: 52777 - DNA, 20 bp, Artificial Sequence
  chemically synthesized
tactgaggcttatgttccat

SEQ ID NO: 52778 - DNA, 20 bp, Artificial Sequence
  chemically synthesized
actgaggcttatgttccatg

SEQ ID NO: 52779 - DNA, 20 bp, Artificial Sequence
  chemically synthesized
ctgaggcttatgttccatgg

SEQ ID NO: 52780 - DNA, 20 bp, Artificial Sequence
  chemically synthesized
tgaggcttatgttccatggg

SEQ ID NO: 52781 - DNA, 20 bp, Artificial Sequence
  chemically synthesized
gcttatgttccatggggggc

SEQ ID NO: 52782 - DNA, 20 bp, Artificial Sequence
  chemically synthesized
cttatgttccatggggggcc

SEQ ID NO: 52783 - DNA, 20 bp, Artificial Sequence
  chemically synthesized
ttatgttccatggggggcca

SEQ ID NO: 52784 - DNA, 20 bp, Artificial Sequence
  chemically synthesized
tatgttccatggggggccag

SEQ ID NO: 52785 - DNA, 20 bp, Artificial Sequence
  chemically synthesized
ttccatggggggccaggggc

SEQ ID NO: 52786 - DNA, 20 bp, Artificial Sequence
  chemically synthesized
tccatggggggccaggggcc

SEQ ID NO: 52787 - DNA, 20 bp, Artificial Sequence
  chemically synthesized
tggggggccaggggccagga

SEQ ID NO: 52788 - DNA, 20 bp, Artificial Sequence
  chemically synthesized
gccaggggccaggacagtga

SEQ ID NO: 52789 - DNA, 20 bp, Artificial Sequence
  chemically synthesized
ccaggggccaggacagtgat

SEQ ID NO: 52790 - DNA, 20 bp, Artificial Sequence
  chemically synthesized
aggggccaggacagtgatgg

SEQ ID NO: 52791 - DNA, 20 bp, Artificial Sequence
  chemically synthesized
ggggccaggacagtgatggg

SEQ ID NO: 52792 - DNA, 20 bp, Artificial Sequence
  chemically synthesized
ggccaggacagtgatgggag

SEQ ID NO: 52793 - DNA, 20 bp, Artificial Sequence
  chemically synthesized
ggacagtgatgggaggagac

SEQ ID NO: 52794 - DNA, 20 bp, Artificial Sequence
  chemically synthesized
gacagtgatgggaggagaca

SEQ ID NO: 52795 - DNA, 20 bp, Artificial Sequence
  chemically synthesized
agtgatgggaggagacaagg

SEQ ID NO: 52796 - DNA, 20 bp, Artificial Sequence
  chemically synthesized
gggaggagacaaggcggata

SEQ ID NO: 52797 - DNA, 20 bp, Artificial Sequence
  chemically synthesized
gaggagacaaggcggataca

SEQ ID NO: 52798 - DNA, 20 bp, Artificial Sequence
  chemically synthesized
aggagacaaggcggatacag

SEQ ID NO: 52799 - DNA, 20 bp, Artificial Sequence
  chemically synthesized
gagacaaggcggatacagag

SEQ ID NO: 52800 - DNA, 20 bp, Artificial Sequence
  chemically synthesized
acaaggcggatacagaggag

SEQ ID NO: 52801 - DNA, 20 bp, Artificial Sequence
  chemically synthesized
gaggagcagattgtcatctc

SEQ ID NO: 52802 - DNA, 20 bp, Artificial Sequence
  chemically synthesized
agcagattgtcatctccagc

SEQ ID NO: 52803 - DNA, 20 bp, Artificial Sequence
  chemically synthesized
gcagattgtcatctccagct

SEQ ID NO: 52804 - DNA, 20 bp, Artificial Sequence
  chemically synthesized
agattgtcatctccagctgg

SEQ ID NO: 52805 - DNA, 20 bp, Artificial Sequence
  chemically synthesized
gattgtcatctccagctggg

SEQ ID NO: 52806 - DNA, 20 bp, Artificial Sequence
  chemically synthesized
catctccagctgggaggtga

SEQ ID NO: 52807 - DNA, 20 bp, Artificial Sequence
  chemically synthesized
tggccatgcctgcacccctc

SEQ ID NO: 52808 - DNA, 20 bp, Artificial Sequence
  chemically synthesized
catgcctgcacccctctggc

SEQ ID NO: 52809 - DNA, 20 bp, Artificial Sequence
  chemically synthesized
gcctgcacccctctggccag

SEQ ID NO: 52810 - DNA, 20 bp, Artificial Sequence
  chemically synthesized
ctgcacccctctggccagca

SEQ ID NO: 52811 - DNA, 20 bp, Artificial Sequence
  chemically synthesized
tgcacccctctggccagcag

SEQ ID NO: 52812 - DNA, 20 bp, Artificial Sequence
  chemically synthesized
gcacccctctggccagcaga

SEQ ID NO: 52813 - DNA, 20 bp, Artificial Sequence
  chemically synthesized
cccctctggccagcagaggg

SEQ ID NO: 52814 - DNA, 20 bp, Artificial Sequence
  chemically synthesized
tctggccagcagagggtggt

SEQ ID NO: 52815 - DNA, 20 bp, Artificial Sequence
  chemically synthesized
ggccagcagagggtggtcag

SEQ ID NO: 52816 - DNA, 20 bp, Artificial Sequence
  chemically synthesized
gccagcagagggtggtcagt

SEQ ID NO: 52817 - DNA, 20 bp, Artificial Sequence
  chemically synthesized
gagggtggtcagtaggaaac

SEQ ID NO: 52818 - DNA, 20 bp, Artificial Sequence
  chemically synthesized
agggtggtcagtaggaaact

SEQ ID NO: 52819 - DNA, 20 bp, Artificial Sequence
  chemically synthesized
ggtggtcagtaggaaactgg

SEQ ID NO: 52820 - DNA, 20 bp, Artificial Sequence
  chemically synthesized
gtggtcagtaggaaactggg

SEQ ID NO: 52821 - DNA, 20 bp, Artificial Sequence
  chemically synthesized
gtaggaaactgggaggccat

SEQ ID NO: 52822 - DNA, 20 bp, Artificial Sequence
  chemically synthesized
taggaaactgggaggccatt

SEQ ID NO: 52823 - DNA, 20 bp, Artificial Sequence
  chemically synthesized
aggaaactgggaggccatta

SEQ ID NO: 52824 - DNA, 20 bp, Artificial Sequence
  chemically synthesized
ccattagggcaaccttctat

SEQ ID NO: 52825 - DNA, 20 bp, Artificial Sequence
  chemically synthesized
agggcaaccttctattggct

SEQ ID NO: 52826 - DNA, 20 bp, Artificial Sequence
  chemically synthesized
accttctattggctcagact

SEQ ID NO: 52827 - DNA, 20 bp, Artificial Sequence
  chemically synthesized
attggctcagactcagaatg

SEQ ID NO: 52828 - DNA, 20 bp, Artificial Sequence
  chemically synthesized
ggctcagactcagaatgcag

SEQ ID NO: 52829 - DNA, 20 bp, Artificial Sequence
  chemically synthesized
gcagtagaacttgtgccctg

SEQ ID NO: 52830 - DNA, 20 bp, Artificial Sequence
  chemically synthesized
cttgtgccctgtagtgttca

SEQ ID NO: 52831 - DNA, 20 bp, Artificial Sequence
  chemically synthesized
tgccctgtagtgttcatgga

SEQ ID NO: 52832 - DNA, 20 bp, Artificial Sequence
  chemically synthesized
gccctgtagtgttcatggac

SEQ ID NO: 52833 - DNA, 20 bp, Artificial Sequence
  chemically synthesized
cctgtagtgttcatggacag

SEQ ID NO: 52834 - DNA, 20 bp, Artificial Sequence
  chemically synthesized
tagtgttcatggacaggagt

SEQ ID NO: 52835 - DNA, 20 bp, Artificial Sequence
  chemically synthesized
gtgttcatggacaggagtga

SEQ ID NO: 52836 - DNA, 20 bp, Artificial Sequence
  chemically synthesized
tgttcatggacaggagtgag

SEQ ID NO: 52837 - DNA, 20 bp, Artificial Sequence
  chemically synthesized
ttcatggacaggagtgagag

SEQ ID NO: 52838 - DNA, 20 bp, Artificial Sequence
  chemically synthesized
tcatggacaggagtgagagg

SEQ ID NO: 52839 - DNA, 20 bp, Artificial Sequence
  chemically synthesized
ggacaggagtgagaggagga

SEQ ID NO: 52840 - DNA, 20 bp, Artificial Sequence
  chemically synthesized
gacaggagtgagaggaggac

SEQ ID NO: 52841 - DNA, 20 bp, Artificial Sequence
  chemically synthesized
agtgagaggaggacaggact

SEQ ID NO: 52842 - DNA, 20 bp, Artificial Sequence
  chemically synthesized
gtgagaggaggacaggactg

SEQ ID NO: 52843 - DNA, 20 bp, Artificial Sequence
  chemically synthesized
tgagaggaggacaggactga

SEQ ID NO: 52844 - DNA, 20 bp, Artificial Sequence
  chemically synthesized
gagaggaggacaggactgag

SEQ ID NO: 52845 - DNA, 20 bp, Artificial Sequence
  chemically synthesized
aggacaggactgaggggatg

SEQ ID NO: 52846 - DNA, 20 bp, Artificial Sequence
  chemically synthesized
actgaggggatgtggctgtc

SEQ ID NO: 52847 - DNA, 20 bp, Artificial Sequence
  chemically synthesized
ctgaggggatgtggctgtca

SEQ ID NO: 52848 - DNA, 20 bp, Artificial Sequence
  chemically synthesized
tgtggctgtcaaggcctttc

SEQ ID NO: 52849 - DNA, 20 bp, Artificial Sequence
  chemically synthesized
gtggctgtcaaggcctttct

SEQ ID NO: 52850 - DNA, 20 bp, Artificial Sequence
  chemically synthesized
tggctgtcaaggcctttcta

SEQ ID NO: 52851 - DNA, 20 bp, Artificial Sequence
  chemically synthesized
ggctgtcaaggcctttctag

SEQ ID NO: 52852 - DNA, 20 bp, Artificial Sequence
  chemically synthesized
gggcgatgctgtctctccct

SEQ ID NO: 52853 - DNA, 20 bp, Artificial Sequence
  chemically synthesized
atgctgtctctccctcagca

SEQ ID NO: 52854 - DNA, 20 bp, Artificial Sequence
  chemically synthesized
tgctgtctctccctcagcat

SEQ ID NO: 52855 - DNA, 20 bp, Artificial Sequence
  chemically synthesized
gctgtctctccctcagcata

SEQ ID NO: 52856 - DNA, 20 bp, Artificial Sequence
  chemically synthesized
tgtctctccctcagcatagg

SEQ ID NO: 52857 - DNA, 20 bp, Artificial Sequence
  chemically synthesized
ctctccctcagcatagggag

SEQ ID NO: 52858 - DNA, 20 bp, Artificial Sequence
  chemically synthesized
tctccctcagcatagggagt

SEQ ID NO: 52859 - DNA, 20 bp, Artificial Sequence
  chemically synthesized
ggagtgggcccttccacctc

SEQ ID NO: 52860 - DNA, 20 bp, Artificial Sequence
  chemically synthesized
cacctctggcctctctcccc

SEQ ID NO: 52861 - DNA, 20 bp, Artificial Sequence
  chemically synthesized
acctctggcctctctccccc

SEQ ID NO: 52862 - DNA, 20 bp, Artificial Sequence
  chemically synthesized
cctctggcctctctccccca

SEQ ID NO: 52863 - DNA, 20 bp, Artificial Sequence
  chemically synthesized
ctctcccccagggctgtgtc

SEQ ID NO: 52864 - DNA, 20 bp, Artificial Sequence
  chemically synthesized
gctgtccctgataaaactgt

SEQ ID NO: 52865 - DNA, 20 bp, Artificial Sequence
  chemically synthesized
tccctgataaaactgtgaga

SEQ ID NO: 52866 - DNA, 20 bp, Artificial Sequence
  chemically synthesized
taaaactgtgagatggtgtg

SEQ ID NO: 52867 - DNA, 20 bp, Artificial Sequence
  chemically synthesized
tgtgagatggtgtgcagtgt

SEQ ID NO: 52868 - DNA, 20 bp, Artificial Sequence
  chemically synthesized
tgagatggtgtgcagtgtcg

SEQ ID NO: 52869 - DNA, 20 bp, Artificial Sequence
  chemically synthesized
ggtgtgcagtgtcggagcat

SEQ ID NO: 52870 - DNA, 20 bp, Artificial Sequence
  chemically synthesized
gtgtgcagtgtcggagcatg

SEQ ID NO: 52871 - DNA, 20 bp, Artificial Sequence
  chemically synthesized
tgtcggagcatgaggccact

SEQ ID NO: 52872 - DNA, 20 bp, Artificial Sequence
  chemically synthesized
agcatgaggccactaagtgc

SEQ ID NO: 52873 - DNA, 20 bp, Artificial Sequence
  chemically synthesized
catgaggccactaagtgcca

SEQ ID NO: 52874 - DNA, 20 bp, Artificial Sequence
  chemically synthesized
agtttccgcgaccatatgaa

SEQ ID NO: 52875 - DNA, 20 bp, Artificial Sequence
  chemically synthesized
aaaagcgtcattccatccga

SEQ ID NO: 52876 - DNA, 20 bp, Artificial Sequence
  chemically synthesized
gtcattccatccgatggtcc

SEQ ID NO: 52877 - DNA, 20 bp, Artificial Sequence
  chemically synthesized
gtcccagtgttgcttgtgtg

SEQ ID NO: 52878 - DNA, 20 bp, Artificial Sequence
  chemically synthesized
cagtgttgcttgtgtgaaga

SEQ ID NO: 52879 - DNA, 20 bp, Artificial Sequence
  chemically synthesized
gcctcctaccttgattgcat

SEQ ID NO: 52880 - DNA, 20 bp, Artificial Sequence
  chemically synthesized
cctcctaccttgattgcatc

SEQ ID NO: 52881 - DNA, 20 bp, Artificial Sequence
  chemically synthesized
ctcctaccttgattgcatca

SEQ ID NO: 52882 - DNA, 20 bp, Artificial Sequence
  chemically synthesized
gcaatggccctgatgcaatc

SEQ ID NO: 52883 - DNA, 20 bp, Artificial Sequence
  chemically synthesized
caatggccctgatgcaatca

SEQ ID NO: 52884 - DNA, 20 bp, Artificial Sequence
  chemically synthesized
tggccctgatgcaatcaagg

SEQ ID NO: 52885 - DNA, 20 bp, Artificial Sequence
  chemically synthesized
ggccctgatgcaatcaaggt

SEQ ID NO: 52886 - DNA, 20 bp, Artificial Sequence
  chemically synthesized
ccctgatgcaatcaaggtag

SEQ ID NO: 52887 - DNA, 20 bp, Artificial Sequence
  chemically synthesized
cctgatgcaatcaaggtagg

SEQ ID NO: 52888 - DNA, 20 bp, Artificial Sequence
  chemically synthesized
gtaggaggctttcttcacac

SEQ ID NO: 52889 - DNA, 20 bp, Artificial Sequence
  chemically synthesized
tttcttcacacaagcaacac

SEQ ID NO: 52890 - DNA, 20 bp, Artificial Sequence
  chemically synthesized
ttcttcacacaagcaacact

SEQ ID NO: 52891 - DNA, 20 bp, Artificial Sequence
  chemically synthesized
acaagcaacactgggaccat

SEQ ID NO: 52892 - DNA, 20 bp, Artificial Sequence
  chemically synthesized
gcaacactgggaccatcgga

SEQ ID NO: 52893 - DNA, 20 bp, Artificial Sequence
  chemically synthesized
atggaatgacgcttttcata

SEQ ID NO: 52894 - DNA, 20 bp, Artificial Sequence
  chemically synthesized
tgacgcttttcatatggtcg

SEQ ID NO: 52895 - DNA, 20 bp, Artificial Sequence
  chemically synthesized
tcatatggtcgcggaaactc

SEQ ID NO: 52896 - DNA, 20 bp, Artificial Sequence
  chemically synthesized
gtcgcggaaactctggcact

SEQ ID NO: 52897 - DNA, 20 bp, Artificial Sequence
  chemically synthesized
gcggaaactctggcacttag

SEQ ID NO: 52898 - DNA, 20 bp, Artificial Sequence
  chemically synthesized
cgacactgcacaccatctca

SEQ ID NO: 52899 - DNA, 20 bp, Artificial Sequence
  chemically synthesized
acaccatctcacagttttat

SEQ ID NO: 52900 - DNA, 20 bp, Artificial Sequence
  chemically synthesized
caccatctcacagttttatc

SEQ ID NO: 52901 - DNA, 20 bp, Artificial Sequence
  chemically synthesized
accatctcacagttttatca

SEQ ID NO: 52902 - DNA, 20 bp, Artificial Sequence
  chemically synthesized
tctcacagttttatcaggga

SEQ ID NO: 52903 - DNA, 20 bp, Artificial Sequence
  chemically synthesized
acagttttatcagggacagc

SEQ ID NO: 52904 - DNA, 20 bp, Artificial Sequence
  chemically synthesized
ttatcagggacagccagaca

SEQ ID NO: 52905 - DNA, 20 bp, Artificial Sequence
  chemically synthesized
gggacagccagacacagccc

SEQ ID NO: 52906 - DNA, 20 bp, Artificial Sequence
  chemically synthesized
ggacagccagacacagccct

SEQ ID NO: 52907 - DNA, 20 bp, Artificial Sequence
  chemically synthesized
gacagccagacacagccctg

SEQ ID NO: 52908 - DNA, 20 bp, Artificial Sequence
  chemically synthesized
acagccagacacagccctgg

SEQ ID NO: 52909 - DNA, 20 bp, Artificial Sequence
  chemically synthesized
agccagacacagccctgggg

SEQ ID NO: 52910 - DNA, 20 bp, Artificial Sequence
  chemically synthesized
ccagacacagccctggggga

SEQ ID NO: 52911 - DNA, 20 bp, Artificial Sequence
  chemically synthesized
agacacagccctgggggaga

SEQ ID NO: 52912 - DNA, 20 bp, Artificial Sequence
  chemically synthesized
gacacagccctgggggagag

SEQ ID NO: 52913 - DNA, 20 bp, Artificial Sequence
  chemically synthesized
cagccctgggggagagaggc

SEQ ID NO: 52914 - DNA, 20 bp, Artificial Sequence
  chemically synthesized
gccctgggggagagaggcca

SEQ ID NO: 52915 - DNA, 20 bp, Artificial Sequence
  chemically synthesized
ccctgggggagagaggccag

SEQ ID NO: 52916 - DNA, 20 bp, Artificial Sequence
  chemically synthesized
tgggggagagaggccagagg

SEQ ID NO: 52917 - DNA, 20 bp, Artificial Sequence
  chemically synthesized
gggagagaggccagaggtgg

SEQ ID NO: 52918 - DNA, 20 bp, Artificial Sequence
  chemically synthesized
ggagagaggccagaggtgga

SEQ ID NO: 52919 - DNA, 20 bp, Artificial Sequence
  chemically synthesized
gagagaggccagaggtggaa

SEQ ID NO: 52920 - DNA, 20 bp, Artificial Sequence
  chemically synthesized
aagggcccactccctatgct

SEQ ID NO: 52921 - DNA, 20 bp, Artificial Sequence
  chemically synthesized
agggcccactccctatgctg

SEQ ID NO: 52922 - DNA, 20 bp, Artificial Sequence
  chemically synthesized
gggcccactccctatgctga

SEQ ID NO: 52923 - DNA, 20 bp, Artificial Sequence
  chemically synthesized
gcccactccctatgctgagg

SEQ ID NO: 52924 - DNA, 20 bp, Artificial Sequence
  chemically synthesized
ccactccctatgctgaggga

SEQ ID NO: 52925 - DNA, 20 bp, Artificial Sequence
  chemically synthesized
tccctatgctgagggagaga

SEQ ID NO: 52926 - DNA, 20 bp, Artificial Sequence
  chemically synthesized
gggagagacagcatcgcccc

SEQ ID NO: 52927 - DNA, 20 bp, Artificial Sequence
  chemically synthesized
gagacagcatcgcccctaga

SEQ ID NO: 52928 - DNA, 20 bp, Artificial Sequence
  chemically synthesized
agacagcatcgcccctagaa

SEQ ID NO: 52929 - DNA, 20 bp, Artificial Sequence
  chemically synthesized
cgcccctagaaaggccttga

SEQ ID NO: 52930 - DNA, 20 bp, Artificial Sequence
  chemically synthesized
ccttgacagccacatcccct

SEQ ID NO: 52931 - DNA, 20 bp, Artificial Sequence
  chemically synthesized
actcctgtccatgaacacta

SEQ ID NO: 52932 - DNA, 20 bp, Artificial Sequence
  chemically synthesized
ctcctgtccatgaacactac

SEQ ID NO: 52933 - DNA, 20 bp, Artificial Sequence
  chemically synthesized
tcctgtccatgaacactaca

SEQ ID NO: 52934 - DNA, 20 bp, Artificial Sequence
  chemically synthesized
ccatgaacactacagggcac

SEQ ID NO: 52935 - DNA, 20 bp, Artificial Sequence
  chemically synthesized
cacaagttctactgcattct

SEQ ID NO: 52936 - DNA, 20 bp, Artificial Sequence
  chemically synthesized
ttctactgcattctgagtct

SEQ ID NO: 52937 - DNA, 20 bp, Artificial Sequence
  chemically synthesized
gcattctgagtctgagccaa

SEQ ID NO: 52938 - DNA, 20 bp, Artificial Sequence
  chemically synthesized
ttctgagtctgagccaatag

SEQ ID NO: 52939 - DNA, 20 bp, Artificial Sequence
  chemically synthesized
tctgagtctgagccaataga

SEQ ID NO: 52940 - DNA, 20 bp, Artificial Sequence
  chemically synthesized
ccaatagaaggttgccctaa

SEQ ID NO: 52941 - DNA, 20 bp, Artificial Sequence
  chemically synthesized
aggttgccctaatggcctcc

SEQ ID NO: 52942 - DNA, 20 bp, Artificial Sequence
  chemically synthesized
tcctactgaccaccctctgc

SEQ ID NO: 52943 - DNA, 20 bp, Artificial Sequence
  chemically synthesized
actgaccaccctctgctggc

SEQ ID NO: 52944 - DNA, 20 bp, Artificial Sequence
  chemically synthesized
tgaccaccctctgctggcca

SEQ ID NO: 52945 - DNA, 20 bp, Artificial Sequence
  chemically synthesized
gaccaccctctgctggccag

SEQ ID NO: 52946 - DNA, 20 bp, Artificial Sequence
  chemically synthesized
accaccctctgctggccaga

SEQ ID NO: 52947 - DNA, 20 bp, Artificial Sequence
  chemically synthesized
ccaccctctgctggccagag

SEQ ID NO: 52948 - DNA, 20 bp, Artificial Sequence
  chemically synthesized
ctctgctggccagaggggtg

SEQ ID NO: 52949 - DNA, 20 bp, Artificial Sequence
  chemically synthesized
tctgctggccagaggggtgc

SEQ ID NO: 52950 - DNA, 20 bp, Artificial Sequence
  chemically synthesized
tggccagaggggtgcaggca

SEQ ID NO: 52951 - DNA, 20 bp, Artificial Sequence
  chemically synthesized
caggcatggccatcacctcc

SEQ ID NO: 52952 - DNA, 20 bp, Artificial Sequence
  chemically synthesized
catggccatcacctcccagc

SEQ ID NO: 52953 - DNA, 20 bp, Artificial Sequence
  chemically synthesized
tggccatcacctcccagctg

SEQ ID NO: 52954 - DNA, 20 bp, Artificial Sequence
  chemically synthesized
gtctcctcccatcactgtcc

SEQ ID NO: 52955 - DNA, 20 bp, Artificial Sequence
  chemically synthesized
cccatcactgtcctggcccc

SEQ ID NO: 52956 - DNA, 20 bp, Artificial Sequence
  chemically synthesized
tcctggcccctggcccccca

SEQ ID NO: 52957 - DNA, 20 bp, Artificial Sequence
  chemically synthesized
cctggccccccatggaacat

SEQ ID NO: 52958 - DNA, 20 bp, Artificial Sequence
  chemically synthesized
cccccatggaacataagcct

SEQ ID NO: 52959 - DNA, 20 bp, Artificial Sequence
  chemically synthesized
aacataagcctcagtatgca

SEQ ID NO: 52960 - DNA, 20 bp, Artificial Sequence
  chemically synthesized
acataagcctcagtatgcac

SEQ ID NO: 52961 - DNA, 20 bp, Artificial Sequence
  chemically synthesized
cataagcctcagtatgcaca

SEQ ID NO: 52962 - DNA, 20 bp, Artificial Sequence
  chemically synthesized
cagtatgcacagggcgtttt

SEQ ID NO: 52963 - DNA, 20 bp, Artificial Sequence
  chemically synthesized
tttcagctaccccaacacat

SEQ ID NO: 52964 - DNA, 20 bp, Artificial Sequence
  chemically synthesized
ttggcttgctacctcaacta

SEQ ID NO: 52965 - DNA, 20 bp, Artificial Sequence
  chemically synthesized
ctacctcaactatggaaaac

SEQ ID NO: 52966 - DNA, 20 bp, Artificial Sequence
  chemically synthesized
cctcaactatggaaaaccag

SEQ ID NO: 52967 - DNA, 20 bp, Artificial Sequence
  chemically synthesized
ctcaactatggaaaaccagc

SEQ ID NO: 52968 - DNA, 20 bp, Artificial Sequence
  chemically synthesized
tcaactatggaaaaccagcg

SEQ ID NO: 52969 - DNA, 20 bp, Artificial Sequence
  chemically synthesized
caactatggaaaaccagcgg

SEQ ID NO: 52970 - DNA, 20 bp, Artificial Sequence
  chemically synthesized
actatggaaaaccagcgggg

SEQ ID NO: 52971 - DNA, 20 bp, Artificial Sequence
  chemically synthesized
ctatggaaaaccagcggggg

SEQ ID NO: 52972 - DNA, 20 bp, Artificial Sequence
  chemically synthesized
ggaggaattgccatcttttt

SEQ ID NO: 52973 - DNA, 20 bp, Artificial Sequence
  chemically synthesized
ggaattgccatctttttgag

SEQ ID NO: 52974 - DNA, 20 bp, Artificial Sequence
  chemically synthesized
aattgccatctttttgagaa

SEQ ID NO: 52975 - DNA, 20 bp, Artificial Sequence
  chemically synthesized
attgccatctttttgagaag

SEQ ID NO: 52976 - DNA, 20 bp, Artificial Sequence
  chemically synthesized
ttgccatctttttgagaaga

SEQ ID NO: 52977 - DNA, 20 bp, Artificial Sequence
  chemically synthesized
gccatctttttgagaagagg

SEQ ID NO: 52978 - DNA, 20 bp, Artificial Sequence
  chemically synthesized
tctttttgagaagagggagt

SEQ ID NO: 52979 - DNA, 20 bp, Artificial Sequence
  chemically synthesized
tgagaagagggagtgagact

SEQ ID NO: 52980 - DNA, 20 bp, Artificial Sequence
  chemically synthesized
agaagagggagtgagactca

SEQ ID NO: 52981 - DNA, 20 bp, Artificial Sequence
  chemically synthesized
cctttttttttttttaaccc

SEQ ID NO: 52982 - DNA, 20 bp, Artificial Sequence
  chemically synthesized
ctttttttttttttaaccca

SEQ ID NO: 52983 - DNA, 20 bp, Artificial Sequence
  chemically synthesized
aaggtcaccctgcttgtcgt

SEQ ID NO: 52984 - DNA, 20 bp, Artificial Sequence
  chemically synthesized
caccctgcttgtcgttggcc

SEQ ID NO: 52985 - DNA, 20 bp, Artificial Sequence
  chemically synthesized
ctgcttgtcgttggccaagc

SEQ ID NO: 52986 - DNA, 20 bp, Artificial Sequence
  chemically synthesized
tgcttgtcgttggccaagcc

SEQ ID NO: 52987 - DNA, 20 bp, Artificial Sequence
  chemically synthesized
gtcgttggccaagccaggcc

SEQ ID NO: 52988 - DNA, 20 bp, Artificial Sequence
  chemically synthesized
gccaagccaggcctagaatc

SEQ ID NO: 52989 - DNA, 20 bp, Artificial Sequence
  chemically synthesized
ccaagccaggcctagaatct

SEQ ID NO: 52990 - DNA, 20 bp, Artificial Sequence
  chemically synthesized
aggcctagaatctgggtctc

SEQ ID NO: 52991 - DNA, 20 bp, Artificial Sequence
  chemically synthesized
gaatctgggtctccagactc

SEQ ID NO: 52992 - DNA, 20 bp, Artificial Sequence
  chemically synthesized
aatctgggtctccagactct

SEQ ID NO: 52993 - DNA, 20 bp, Artificial Sequence
  chemically synthesized
cagactctgggtctgctact

SEQ ID NO: 52994 - DNA, 20 bp, Artificial Sequence
  chemically synthesized
agactctgggtctgctactc

SEQ ID NO: 52995 - DNA, 20 bp, Artificial Sequence
  chemically synthesized
gactctgggtctgctactca

SEQ ID NO: 52996 - DNA, 20 bp, Artificial Sequence
  chemically synthesized
gtctgctactcagggcacaa

SEQ ID NO: 52997 - DNA, 20 bp, Artificial Sequence
  chemically synthesized
tgctactcagggcacaaaag

SEQ ID NO: 52998 - DNA, 20 bp, Artificial Sequence
  chemically synthesized
acaaaagaagaaaacattct

SEQ ID NO: 52999 - DNA, 20 bp, Artificial Sequence
  chemically synthesized
ttctgagttacaccccttct

SEQ ID NO: 53000 - DNA, 20 bp, Artificial Sequence
  chemically synthesized
gagttacaccccttcttggc

SEQ ID NO: 53001 - DNA, 20 bp, Artificial Sequence
  chemically synthesized
ttacaccccttcttggccag

SEQ ID NO: 53002 - DNA, 20 bp, Artificial Sequence
  chemically synthesized
ccccttcttggccagtagtt

SEQ ID NO: 53003 - DNA, 20 bp, Artificial Sequence
  chemically synthesized
cccttcttggccagtagttg

SEQ ID NO: 53004 - DNA, 20 bp, Artificial Sequence
  chemically synthesized
ccttcttggccagtagttga

SEQ ID NO: 53005 - DNA, 20 bp, Artificial Sequence
  chemically synthesized
gttgagggtaaattaacgaa

SEQ ID NO: 53006 - DNA, 20 bp, Artificial Sequence
  chemically synthesized
cttgtctgttgctctctgtt

SEQ ID NO: 53007 - DNA, 20 bp, Artificial Sequence
  chemically synthesized
ttgtctgttgctctctgttt

SEQ ID NO: 53008 - DNA, 20 bp, Artificial Sequence
  chemically synthesized
tctgttgctctctgtttagg

SEQ ID NO: 53009 - DNA, 20 bp, Artificial Sequence
  chemically synthesized
taaaaactccacaaattcaa

SEQ ID NO: 53010 - DNA, 20 bp, Artificial Sequence
  chemically synthesized
tccattttcaccacactttt

SEQ ID NO: 53011 - DNA, 20 bp, Artificial Sequence
  chemically synthesized
ttggctgccattcacaaaaa

SEQ ID NO: 53012 - DNA, 20 bp, Artificial Sequence
  chemically synthesized
gccattcacaaaaaaagctg

SEQ ID NO: 53013 - DNA, 20 bp, Artificial Sequence
  chemically synthesized
ttcacaaaaaaagctgaagc

SEQ ID NO: 53014 - DNA, 20 bp, Artificial Sequence
  chemically synthesized
aaaaaagctgaagccagcca

SEQ ID NO: 53015 - DNA, 20 bp, Artificial Sequence
  chemically synthesized
aaaaagctgaagccagccat

SEQ ID NO: 53016 - DNA, 20 bp, Artificial Sequence
  chemically synthesized
ggtaactattaaaatccatg

SEQ ID NO: 53017 - DNA, 20 bp, Artificial Sequence
  chemically synthesized
tattaaaatccatgtggttg

SEQ ID NO: 53018 - DNA, 20 bp, Artificial Sequence
  chemically synthesized
ttaaaatccatgtggttgca

SEQ ID NO: 53019 - DNA, 20 bp, Artificial Sequence
  chemically synthesized
aatccatgtggttgcagaga

SEQ ID NO: 53020 - DNA, 20 bp, Artificial Sequence
  chemically synthesized
agacagcatccctatcacat

SEQ ID NO: 53021 - DNA, 20 bp, Artificial Sequence
  chemically synthesized
tgagcttttgccctgtcccc

SEQ ID NO: 53022 - DNA, 20 bp, Artificial Sequence
  chemically synthesized
gagcttttgccctgtcccca

SEQ ID NO: 53023 - DNA, 20 bp, Artificial Sequence
  chemically synthesized
tctgtcatctccactccttg

SEQ ID NO: 53024 - DNA, 20 bp, Artificial Sequence
  chemically synthesized
ctgtcatctccactccttgt

SEQ ID NO: 53025 - DNA, 20 bp, Artificial Sequence
  chemically synthesized
ccactccttgtgggccacca

SEQ ID NO: 53026 - DNA, 20 bp, Artificial Sequence
  chemically synthesized
tccttgtgggccaccacagc

SEQ ID NO: 53027 - DNA, 20 bp, Artificial Sequence
  chemically synthesized
ccttgtgggccaccacagca

SEQ ID NO: 53028 - DNA, 20 bp, Artificial Sequence
  chemically synthesized
ccacagcaaggctgactcac

SEQ ID NO: 53029 - DNA, 20 bp, Artificial Sequence
  chemically synthesized
aggctgactcactggctctg

SEQ ID NO: 53030 - DNA, 20 bp, Artificial Sequence
  chemically synthesized
ctgactcactggctctgaag

SEQ ID NO: 53031 - DNA, 20 bp, Artificial Sequence
  chemically synthesized
ggctctgaagaagatccaca

SEQ ID NO: 53032 - DNA, 20 bp, Artificial Sequence
  chemically synthesized
aagaagatccacaaagcctg

SEQ ID NO: 53033 - DNA, 20 bp, Artificial Sequence
  chemically synthesized
gaagatccacaaagcctgtg

SEQ ID NO: 53034 - DNA, 20 bp, Artificial Sequence
  chemically synthesized
agatccacaaagcctgtgga

SEQ ID NO: 53035 - DNA, 20 bp, Artificial Sequence
  chemically synthesized
gatccacaaagcctgtggag

SEQ ID NO: 53036 - DNA, 20 bp, Artificial Sequence
  chemically synthesized
tccacaaagcctgtggagag

SEQ ID NO: 53037 - DNA, 20 bp, Artificial Sequence
  chemically synthesized
ccacaaagcctgtggagagg

SEQ ID NO: 53038 - DNA, 20 bp, Artificial Sequence
  chemically synthesized
gcctgtggagaggaggccca

SEQ ID NO: 53039 - DNA, 20 bp, Artificial Sequence
  chemically synthesized
agaggaggcccacagctctc

SEQ ID NO: 53040 - DNA, 20 bp, Artificial Sequence
  chemically synthesized
gaggaggcccacagctctcc

SEQ ID NO: 53041 - DNA, 20 bp, Artificial Sequence
  chemically synthesized
cacagctctccaggatgcat

SEQ ID NO: 53042 - DNA, 20 bp, Artificial Sequence
  chemically synthesized
acagctctccaggatgcatg

SEQ ID NO: 53043 - DNA, 20 bp, Artificial Sequence
  chemically synthesized
agctctccaggatgcatgag

SEQ ID NO: 53044 - DNA, 20 bp, Artificial Sequence
  chemically synthesized
gctctccaggatgcatgagg

SEQ ID NO: 53045 - DNA, 20 bp, Artificial Sequence
  chemically synthesized
ctctccaggatgcatgagga

SEQ ID NO: 53046 - DNA, 20 bp, Artificial Sequence
  chemically synthesized
tctccaggatgcatgaggag

SEQ ID NO: 53047 - DNA, 20 bp, Artificial Sequence
  chemically synthesized
gatgcatgaggaggggccac

SEQ ID NO: 53048 - DNA, 20 bp, Artificial Sequence
  chemically synthesized
atgcatgaggaggggccacc

SEQ ID NO: 53049 - DNA, 20 bp, Artificial Sequence
  chemically synthesized
tgcatgaggaggggccacca

SEQ ID NO: 53050 - DNA, 20 bp, Artificial Sequence
  chemically synthesized
tgaggaggggccaccaggga

SEQ ID NO: 53051 - DNA, 20 bp, Artificial Sequence
  chemically synthesized
gccaccagggatggccaccc

SEQ ID NO: 53052 - DNA, 20 bp, Artificial Sequence
  chemically synthesized
gcgacccccattttccctct

SEQ ID NO: 53053 - DNA, 20 bp, Artificial Sequence
  chemically synthesized
ccattttccctcttggccca

SEQ ID NO: 53054 - DNA, 20 bp, Artificial Sequence
  chemically synthesized
cattttccctcttggcccat

SEQ ID NO: 53055 - DNA, 20 bp, Artificial Sequence
  chemically synthesized
tcttggcccatgggaaatcc

SEQ ID NO: 53056 - DNA, 20 bp, Artificial Sequence
  chemically synthesized
cttggcccatgggaaatcct

SEQ ID NO: 53057 - DNA, 20 bp, Artificial Sequence
  chemically synthesized
tggcccatgggaaatcctag

SEQ ID NO: 53058 - DNA, 20 bp, Artificial Sequence
  chemically synthesized
ggcccatgggaaatcctagg

SEQ ID NO: 53059 - DNA, 20 bp, Artificial Sequence
  chemically synthesized
gaaatcctaggaggcaacat

SEQ ID NO: 53060 - DNA, 20 bp, Artificial Sequence
  chemically synthesized
taggaggcaacataagcctg

SEQ ID NO: 53061 - DNA, 20 bp, Artificial Sequence
  chemically synthesized
gaggcaacataagcctgtgg

SEQ ID NO: 53062 - DNA, 20 bp, Artificial Sequence
  chemically synthesized
cctgtggcagcccctccaca

SEQ ID NO: 53063 - DNA, 20 bp, Artificial Sequence
  chemically synthesized
cctccacaaagccctgcctc

SEQ ID NO: 53064 - DNA, 20 bp, Artificial Sequence
  chemically synthesized
tccacaaagccctgcctcca

SEQ ID NO: 53065 - DNA, 20 bp, Artificial Sequence
  chemically synthesized
ccctgcctccagagttccca

SEQ ID NO: 53066 - DNA, 20 bp, Artificial Sequence
  chemically synthesized
cctgcctccagagttcccat

SEQ ID NO: 53067 - DNA, 20 bp, Artificial Sequence
  chemically synthesized
cctccagagttcccataggc

SEQ ID NO: 53068 - DNA, 20 bp, Artificial Sequence
  chemically synthesized
cataggcgagaatgtgtcct

SEQ ID NO: 53069 - DNA, 20 bp, Artificial Sequence
  chemically synthesized
aggcgagaatgtgtcctcag

SEQ ID NO: 53070 - DNA, 20 bp, Artificial Sequence
  chemically synthesized
gcgagaatgtgtcctcagtg

SEQ ID NO: 53071 - DNA, 20 bp, Artificial Sequence
  chemically synthesized
cagtggagcattaccttgca

SEQ ID NO: 53072 - DNA, 20 bp, Artificial Sequence
  chemically synthesized
attaccttgcacagcctgtg

SEQ ID NO: 53073 - DNA, 20 bp, Artificial Sequence
  chemically synthesized
agcctgtgaagtgctctgtg

SEQ ID NO: 53074 - DNA, 20 bp, Artificial Sequence
  chemically synthesized
gcctgtgaagtgctctgtgc

SEQ ID NO: 53075 - DNA, 20 bp, Artificial Sequence
  chemically synthesized
cctgtgaagtgctctgtgcg

SEQ ID NO: 53076 - DNA, 20 bp, Artificial Sequence
  chemically synthesized
aagtgctctgtgcggggata

SEQ ID NO: 53077 - DNA, 20 bp, Artificial Sequence
  chemically synthesized
agtgctctgtgcggggataa

SEQ ID NO: 53078 - DNA, 20 bp, Artificial Sequence
  chemically synthesized
ctctgtgcggggataaaggc

SEQ ID NO: 53079 - DNA, 20 bp, Artificial Sequence
  chemically synthesized
ggggataaaggcaagtaacg

SEQ ID NO: 53080 - DNA, 20 bp, Artificial Sequence
  chemically synthesized
gggataaaggcaagtaacgt

SEQ ID NO: 53081 - DNA, 20 bp, Artificial Sequence
  chemically synthesized
ggataaaggcaagtaacgtg

SEQ ID NO: 53082 - DNA, 20 bp, Artificial Sequence
  chemically synthesized
gtaacgtggggtcctctctc

SEQ ID NO: 53083 - DNA, 20 bp, Artificial Sequence
  chemically synthesized
taacgtggggtcctctctca

SEQ ID NO: 53084 - DNA, 20 bp, Artificial Sequence
  chemically synthesized
gtcctctctcaaggaattgc

SEQ ID NO: 53085 - DNA, 20 bp, Artificial Sequence
  chemically synthesized
ctcaaggaattgctagctta

SEQ ID NO: 53086 - DNA, 20 bp, Artificial Sequence
  chemically synthesized
tcaaggaattgctagcttat

SEQ ID NO: 53087 - DNA, 20 bp, Artificial Sequence
  chemically synthesized
caaggaattgctagcttatg

SEQ ID NO: 53088 - DNA, 20 bp, Artificial Sequence
  chemically synthesized
aggaattgctagcttatggg

SEQ ID NO: 53089 - DNA, 20 bp, Artificial Sequence
  chemically synthesized
gaattgctagcttatgggga

SEQ ID NO: 53090 - DNA, 20 bp, Artificial Sequence
  chemically synthesized
tggggagagaaaactaaacg

SEQ ID NO: 53091 - DNA, 20 bp, Artificial Sequence
  chemically synthesized
ggagagaaaactaaacgtgg

SEQ ID NO: 53092 - DNA, 20 bp, Artificial Sequence
  chemically synthesized
actaaacgtggaagccccaa

SEQ ID NO: 53093 - DNA, 20 bp, Artificial Sequence
  chemically synthesized
tgtgacaaatgccccatgaa

SEQ ID NO: 53094 - DNA, 20 bp, Artificial Sequence
  chemically synthesized
gacaaatgccccatgaatgg

SEQ ID NO: 53095 - DNA, 20 bp, Artificial Sequence
  chemically synthesized
acaaatgccccatgaatggc

SEQ ID NO: 53096 - DNA, 20 bp, Artificial Sequence
  chemically synthesized
aatgccccatgaatggcagg

SEQ ID NO: 53097 - DNA, 20 bp, Artificial Sequence
  chemically synthesized
gccccatgaatggcaggcag

SEQ ID NO: 53098 - DNA, 20 bp, Artificial Sequence
  chemically synthesized
catgaatggcaggcagaagt

SEQ ID NO: 53099 - DNA, 20 bp, Artificial Sequence
  chemically synthesized
tgaatggcaggcagaagtta

SEQ ID NO: 53100 - DNA, 20 bp, Artificial Sequence
  chemically synthesized
caggcagaagttagagtatg

SEQ ID NO: 53101 - DNA, 20 bp, Artificial Sequence
  chemically synthesized
aggcagaagttagagtatga

SEQ ID NO: 53102 - DNA, 20 bp, Artificial Sequence
  chemically synthesized
ggcagaagttagagtatgaa

SEQ ID NO: 53103 - DNA, 20 bp, Artificial Sequence
  chemically synthesized
gcagaagttagagtatgaag

SEQ ID NO: 53104 - DNA, 20 bp, Artificial Sequence
  chemically synthesized
cagaagttagagtatgaagg

SEQ ID NO: 53105 - DNA, 20 bp, Artificial Sequence
  chemically synthesized
gtatgaagggggccccacct

SEQ ID NO: 53106 - DNA, 20 bp, Artificial Sequence
  chemically synthesized
tatgaagggggccccacctc

SEQ ID NO: 53107 - DNA, 20 bp, Artificial Sequence
  chemically synthesized
tgaagggggccccacctcag

SEQ ID NO: 53108 - DNA, 20 bp, Artificial Sequence
  chemically synthesized
gaagggggccccacctcagg

SEQ ID NO: 53109 - DNA, 20 bp, Artificial Sequence
  chemically synthesized
ggggccccacctcaggaggt

SEQ ID NO: 53110 - DNA, 20 bp, Artificial Sequence
  chemically synthesized
gggccccacctcaggaggtc

SEQ ID NO: 53111 - DNA, 20 bp, Artificial Sequence
  chemically synthesized
ggccccacctcaggaggtcg

SEQ ID NO: 53112 - DNA, 20 bp, Artificial Sequence
  chemically synthesized
ccccacctcaggaggtcggg

SEQ ID NO: 53113 - DNA, 20 bp, Artificial Sequence
  chemically synthesized
cctcaggaggtcggggagtg

SEQ ID NO: 53114 - DNA, 20 bp, Artificial Sequence
  chemically synthesized
gaggtcggggagtgtggcgt

SEQ ID NO: 53115 - DNA, 20 bp, Artificial Sequence
  chemically synthesized
tggcgtcagccactgcccca

SEQ ID NO: 53116 - DNA, 20 bp, Artificial Sequence
  chemically synthesized
cgtcagccactgccccatag

SEQ ID NO: 53117 - DNA, 20 bp, Artificial Sequence
  chemically synthesized
gtcagccactgccccatagc

SEQ ID NO: 53118 - DNA, 20 bp, Artificial Sequence
  chemically synthesized
atgtgtgcaacatctgccac

SEQ ID NO: 53119 - DNA, 20 bp, Artificial Sequence
  chemically synthesized
caacatctgccactggtact

SEQ ID NO: 53120 - DNA, 20 bp, Artificial Sequence
  chemically synthesized
tgaccctcatttgaccctcc

SEQ ID NO: 53121 - DNA, 20 bp, Artificial Sequence
  chemically synthesized
gaccctcatttgaccctccc

SEQ ID NO: 53122 - DNA, 20 bp, Artificial Sequence
  chemically synthesized
ctcatttgaccctcccaggc

SEQ ID NO: 53123 - DNA, 20 bp, Artificial Sequence
  chemically synthesized
tgctgtgatgaccccctccc

SEQ ID NO: 53124 - DNA, 20 bp, Artificial Sequence
  chemically synthesized
gtgatgaccccctccctggt

SEQ ID NO: 53125 - DNA, 20 bp, Artificial Sequence
  chemically synthesized
tgatgaccccctccctggtg

SEQ ID NO: 53126 - DNA, 20 bp, Artificial Sequence
  chemically synthesized
atgaccccctccctggtgag

SEQ ID NO: 53127 - DNA, 20 bp, Artificial Sequence
  chemically synthesized
ccccctccctggtgaggagc

SEQ ID NO: 53128 - DNA, 20 bp, Artificial Sequence
  chemically synthesized
ctccctggtgaggagccggc

SEQ ID NO: 53129 - DNA, 20 bp, Artificial Sequence
  chemically synthesized
tccctggtgaggagccggcc

SEQ ID NO: 53130 - DNA, 20 bp, Artificial Sequence
  chemically synthesized
gtgaggagccggccaggact

SEQ ID NO: 53131 - DNA, 20 bp, Artificial Sequence
  chemically synthesized
gccggccaggacttggatcc

SEQ ID NO: 53132 - DNA, 20 bp, Artificial Sequence
  chemically synthesized
ggccaggacttggatccaag

SEQ ID NO: 53133 - DNA, 20 bp, Artificial Sequence
  chemically synthesized
ggacttggatccaagaagtc

SEQ ID NO: 53134 - DNA, 20 bp, Artificial Sequence
  chemically synthesized
cccatgctctgaccgctcga

SEQ ID NO: 53135 - DNA, 20 bp, Artificial Sequence
  chemically synthesized
gctcgatggcaccgcttcct

SEQ ID NO: 53136 - DNA, 20 bp, Artificial Sequence
  chemically synthesized
cgatggcaccgcttccttgg

SEQ ID NO: 53137 - DNA, 20 bp, Artificial Sequence
  chemically synthesized
gatggcaccgcttccttggc

SEQ ID NO: 53138 - DNA, 20 bp, Artificial Sequence
  chemically synthesized
cttccttggcaggacatcta

SEQ ID NO: 53139 - DNA, 20 bp, Artificial Sequence
  chemically synthesized
ggcaggacatctacagctcc

SEQ ID NO: 53140 - DNA, 20 bp, Artificial Sequence
  chemically synthesized
gcaggacatctacagctccc

SEQ ID NO: 53141 - DNA, 20 bp, Artificial Sequence
  chemically synthesized
caggacatctacagctccca

SEQ ID NO: 53142 - DNA, 20 bp, Artificial Sequence
  chemically synthesized
tctacagctcccagggcacc

SEQ ID NO: 53143 - DNA, 20 bp, Artificial Sequence
  chemically synthesized
ctacagctcccagggcaccc

SEQ ID NO: 53144 - DNA, 20 bp, Artificial Sequence
  chemically synthesized
tacagctcccagggcaccca

SEQ ID NO: 53145 - DNA, 20 bp, Artificial Sequence
  chemically synthesized
acagctcccagggcacccag

SEQ ID NO: 53146 - DNA, 20 bp, Artificial Sequence
  chemically synthesized
ccagggcacccaggggacat

SEQ ID NO: 53147 - DNA, 20 bp, Artificial Sequence
  chemically synthesized
caggggacatcagcctctga

SEQ ID NO: 53148 - DNA, 20 bp, Artificial Sequence
  chemically synthesized
aggggacatcagcctctgaa

SEQ ID NO: 53149 - DNA, 20 bp, Artificial Sequence
  chemically synthesized
ggggacatcagcctctgaaa

SEQ ID NO: 53150 - DNA, 20 bp, Artificial Sequence
  chemically synthesized
gggacatcagcctctgaaag

SEQ ID NO: 53151 - DNA, 20 bp, Artificial Sequence
  chemically synthesized
atcagcctctgaaaggggaa

SEQ ID NO: 53152 - DNA, 20 bp, Artificial Sequence
  chemically synthesized
gcctctgaaaggggaatggt

SEQ ID NO: 53153 - DNA, 20 bp, Artificial Sequence
  chemically synthesized
gaaaggggaatggtcagacc

SEQ ID NO: 53154 - DNA, 20 bp, Artificial Sequence
  chemically synthesized
aaaggggaatggtcagaccc

SEQ ID NO: 53155 - DNA, 20 bp, Artificial Sequence
  chemically synthesized
aggggaatggtcagacccgg

SEQ ID NO: 53156 - DNA, 20 bp, Artificial Sequence
  chemically synthesized
ggggaatggtcagacccggg

SEQ ID NO: 53157 - DNA, 20 bp, Artificial Sequence
  chemically synthesized
gaggccttgaatgccatgct

SEQ ID NO: 53158 - DNA, 20 bp, Artificial Sequence
  chemically synthesized
aggccttgaatgccatgcta

SEQ ID NO: 53159 - DNA, 20 bp, Artificial Sequence
  chemically synthesized
gccttgaatgccatgctaag

SEQ ID NO: 53160 - DNA, 20 bp, Artificial Sequence
  chemically synthesized
gaatgccatgctaaggagtt

SEQ ID NO: 53161 - DNA, 20 bp, Artificial Sequence
  chemically synthesized
ctaaggagttcggacttgac

SEQ ID NO: 53162 - DNA, 20 bp, Artificial Sequence
  chemically synthesized
aaggagttcggacttgacaa

SEQ ID NO: 53163 - DNA, 20 bp, Artificial Sequence
  chemically synthesized
aggagttcggacttgacaag

SEQ ID NO: 53164 - DNA, 20 bp, Artificial Sequence
  chemically synthesized
agttcggacttgacaagagg

SEQ ID NO: 53165 - DNA, 20 bp, Artificial Sequence
  chemically synthesized
tcggacttgacaagaggcag

SEQ ID NO: 53166 - DNA, 20 bp, Artificial Sequence
  chemically synthesized
cttgacaagaggcagcagca

SEQ ID NO: 53167 - DNA, 20 bp, Artificial Sequence
  chemically synthesized
ttgacaagaggcagcagcaa

SEQ ID NO: 53168 - DNA, 20 bp, Artificial Sequence
  chemically synthesized
tgacaagaggcagcagcaaa

SEQ ID NO: 53169 - DNA, 20 bp, Artificial Sequence
  chemically synthesized
agcaaagggttttgataacc

SEQ ID NO: 53170 - DNA, 20 bp, Artificial Sequence
  chemically synthesized
aagggttttgataacctggt

SEQ ID NO: 53171 - DNA, 20 bp, Artificial Sequence
  chemically synthesized
ttattgtatttcactgctgc

SEQ ID NO: 53172 - DNA, 20 bp, Artificial Sequence
  chemically synthesized
ttcactgctgcaagatttac

SEQ ID NO: 53173 - DNA, 20 bp, Artificial Sequence
  chemically synthesized
gctgcaagatttactggaca

SEQ ID NO: 53174 - DNA, 20 bp, Artificial Sequence
  chemically synthesized
tgcaagatttactggacaaa

SEQ ID NO: 53175 - DNA, 20 bp, Artificial Sequence
  chemically synthesized
gcaagatttactggacaaag

SEQ ID NO: 53176 - DNA, 20 bp, Artificial Sequence
  chemically synthesized
aagatttactggacaaagag

SEQ ID NO: 53177 - DNA, 20 bp, Artificial Sequence
  chemically synthesized
agatttactggacaaagagg

SEQ ID NO: 53178 - DNA, 20 bp, Artificial Sequence
  chemically synthesized
atttactggacaaagaggag

SEQ ID NO: 53179 - DNA, 20 bp, Artificial Sequence
  chemically synthesized
tttactggacaaagaggagg

SEQ ID NO: 53180 - DNA, 20 bp, Artificial Sequence
  chemically synthesized
ttactggacaaagaggagga

SEQ ID NO: 53181 - DNA, 20 bp, Artificial Sequence
  chemically synthesized
tactggacaaagaggaggag

SEQ ID NO: 53182 - DNA, 20 bp, Artificial Sequence
  chemically synthesized
actggacaaagaggaggagg

SEQ ID NO: 53183 - DNA, 20 bp, Artificial Sequence
  chemically synthesized
tggacaaagaggaggagggg

SEQ ID NO: 53184 - DNA, 20 bp, Artificial Sequence
  chemically synthesized
acaaagaggaggagggggag

SEQ ID NO: 53185 - DNA, 20 bp, Artificial Sequence
  chemically synthesized
agaggaggagggggagaaga

SEQ ID NO: 53186 - DNA, 20 bp, Artificial Sequence
  chemically synthesized
gaggagggggagaagacagt

SEQ ID NO: 53187 - DNA, 20 bp, Artificial Sequence
  chemically synthesized
gggggagaagacagtgagtg

SEQ ID NO: 53188 - DNA, 20 bp, Artificial Sequence
  chemically synthesized
gaagacagtgagtgcagtga

SEQ ID NO: 53189 - DNA, 20 bp, Artificial Sequence
  chemically synthesized
aagacagtgagtgcagtgaa

SEQ ID NO: 53190 - DNA, 20 bp, Artificial Sequence
  chemically synthesized
tgagtgcagtgaaaggtgtc

SEQ ID NO: 53191 - DNA, 20 bp, Artificial Sequence
  chemically synthesized
gtgcagtgaaaggtgtctag

SEQ ID NO: 53192 - DNA, 20 bp, Artificial Sequence
  chemically synthesized
tgaaaggtgtctagaagccc

SEQ ID NO: 53193 - DNA, 20 bp, Artificial Sequence
  chemically synthesized
ggtgtctagaagcccaagca

SEQ ID NO: 53194 - DNA, 20 bp, Artificial Sequence
  chemically synthesized
gtgtctagaagcccaagcaa

SEQ ID NO: 53195 - DNA, 20 bp, Artificial Sequence
  chemically synthesized
ctagaagcccaagcaaaggc

SEQ ID NO: 53196 - DNA, 20 bp, Artificial Sequence
  chemically synthesized
tagaagcccaagcaaaggcc

SEQ ID NO: 53197 - DNA, 20 bp, Artificial Sequence
  chemically synthesized
agaagcccaagcaaaggcca

SEQ ID NO: 53198 - DNA, 20 bp, Artificial Sequence
  chemically synthesized
gaagcccaagcaaaggccag

SEQ ID NO: 53199 - DNA, 20 bp, Artificial Sequence
  chemically synthesized
gcccaagcaaaggccagggg

SEQ ID NO: 53200 - DNA, 20 bp, Artificial Sequence
  chemically synthesized
cccaagcaaaggccaggggt

SEQ ID NO: 53201 - DNA, 20 bp, Artificial Sequence
  chemically synthesized
ccaagcaaaggccaggggtg

SEQ ID NO: 53202 - DNA, 20 bp, Artificial Sequence
  chemically synthesized
caaaggccaggggtggggcg

SEQ ID NO: 53203 - DNA, 20 bp, Artificial Sequence
  chemically synthesized
aaggccaggggtggggcgta

SEQ ID NO: 53204 - DNA, 20 bp, Artificial Sequence
  chemically synthesized
ggccaggggtggggcgtaga

SEQ ID NO: 53205 - DNA, 20 bp, Artificial Sequence
  chemically synthesized
gccaggggtggggcgtagag

SEQ ID NO: 53206 - DNA, 20 bp, Artificial Sequence
  chemically synthesized
ggtggggcgtagagaggcaa

SEQ ID NO: 53207 - DNA, 20 bp, Artificial Sequence
  chemically synthesized
gggcgtagagaggcaatgga

SEQ ID NO: 53208 - DNA, 20 bp, Artificial Sequence
  chemically synthesized
ggcgtagagaggcaatggaa

SEQ ID NO: 53209 - DNA, 20 bp, Artificial Sequence
  chemically synthesized
agaggcaatggaaaggcacc

SEQ ID NO: 53210 - DNA, 20 bp, Artificial Sequence
  chemically synthesized
tggaaaggcacccagacacc

SEQ ID NO: 53211 - DNA, 20 bp, Artificial Sequence
  chemically synthesized
ggaaaggcacccagacaccc

SEQ ID NO: 53212 - DNA, 20 bp, Artificial Sequence
  chemically synthesized
cacccagacacccaggcttc

SEQ ID NO: 53213 - DNA, 20 bp, Artificial Sequence
  chemically synthesized
gacacccaggcttccagcct

SEQ ID NO: 53214 - DNA, 20 bp, Artificial Sequence
  chemically synthesized
ccaggcttccagcctgagcg

SEQ ID NO: 53215 - DNA, 20 bp, Artificial Sequence
  chemically synthesized
aggcttccagcctgagcgcg

SEQ ID NO: 53216 - DNA, 20 bp, Artificial Sequence
  chemically synthesized
gcctgagcgcggagtgcatg

SEQ ID NO: 53217 - DNA, 20 bp, Artificial Sequence
  chemically synthesized
cctgagcgcggagtgcatgc

SEQ ID NO: 53218 - DNA, 20 bp, Artificial Sequence
  chemically synthesized
cggagtgcatgcaggctgcg

SEQ ID NO: 53219 - DNA, 20 bp, Artificial Sequence
  chemically synthesized
agtgcatgcaggctgcgcgg

SEQ ID NO: 53220 - DNA, 20 bp, Artificial Sequence
  chemically synthesized
caggctgcgcggtggccgcc

SEQ ID NO: 53221 - DNA, 20 bp, Artificial Sequence
  chemically synthesized
aggctgcgcggtggccgccc

SEQ ID NO: 53222 - DNA, 20 bp, Artificial Sequence
  chemically synthesized
cgcggtggccgcccgggttg

SEQ ID NO: 53223 - DNA, 20 bp, Artificial Sequence
  chemically synthesized
gcggtggccgcccgggttgc

SEQ ID NO: 53224 - DNA, 20 bp, Artificial Sequence
  chemically synthesized
cggtggccgcccgggttgca

SEQ ID NO: 53225 - DNA, 20 bp, Artificial Sequence
  chemically synthesized
cccgggttgcagggaacgcg

SEQ ID NO: 53226 - DNA, 20 bp, Artificial Sequence
  chemically synthesized
ccgggttgcagggaacgcgc

SEQ ID NO: 53227 - DNA, 20 bp, Artificial Sequence
  chemically synthesized
gttgcagggaacgcgcgggc

SEQ ID NO: 53228 - DNA, 20 bp, Artificial Sequence
  chemically synthesized
cgcgcgggccagcgactctg

SEQ ID NO: 53229 - DNA, 20 bp, Artificial Sequence
  chemically synthesized
accccgtgcccgcactcacc

SEQ ID NO: 53230 - DNA, 20 bp, Artificial Sequence
  chemically synthesized
ccccgtgcccgcactcaccc

SEQ ID NO: 53231 - DNA, 20 bp, Artificial Sequence
  chemically synthesized
gtgcccgcactcacccagga

SEQ ID NO: 53232 - DNA, 20 bp, Artificial Sequence
  chemically synthesized
cgcactcacccaggacggcg

SEQ ID NO: 53233 - DNA, 20 bp, Artificial Sequence
  chemically synthesized
tcacccaggacggcgcagac

SEQ ID NO: 53234 - DNA, 20 bp, Artificial Sequence
  chemically synthesized
cccaggacggcgcagaccag

SEQ ID NO: 53235 - DNA, 20 bp, Artificial Sequence
  chemically synthesized
ccaggacggcgcagaccagc

SEQ ID NO: 53236 - DNA, 20 bp, Artificial Sequence
  chemically synthesized
caggacggcgcagaccagca

SEQ ID NO: 53237 - DNA, 20 bp, Artificial Sequence
  chemically synthesized
gcagaccagcagggctccca

SEQ ID NO: 53238 - DNA, 20 bp, Artificial Sequence
  chemically synthesized
accagcagggctcccacggc

SEQ ID NO: 53239 - DNA, 20 bp, Artificial Sequence
  chemically synthesized
ccacggcgagcctcatcttc

SEQ ID NO: 53240 - DNA, 20 bp, Artificial Sequence
  chemically synthesized
cacggcgagcctcatcttcc

SEQ ID NO: 53241 - DNA, 20 bp, Artificial Sequence
  chemically synthesized
cgagcctcatcttccgggtg

SEQ ID NO: 53242 - DNA, 20 bp, Artificial Sequence
  chemically synthesized
catcttccgggtgcggcgct

SEQ ID NO: 53243 - DNA, 20 bp, Artificial Sequence
  chemically synthesized
cttccgggtgcggcgctgag

SEQ ID NO: 53244 - DNA, 20 bp, Artificial Sequence
  chemically synthesized
cgggtgcggcgctgagcagc

SEQ ID NO: 53245 - DNA, 20 bp, Artificial Sequence
  chemically synthesized
gcggcgctgagcagcgagca

SEQ ID NO: 53246 - DNA, 20 bp, Artificial Sequence
  chemically synthesized
cgctgagcagcgagcacagt

SEQ ID NO: 53247 - DNA, 20 bp, Artificial Sequence
  chemically synthesized
cagtcggactcgcttctgtg

SEQ ID NO: 53248 - DNA, 20 bp, Artificial Sequence
  chemically synthesized
actcgcttctgtgcagcctc

SEQ ID NO: 53249 - DNA, 20 bp, Artificial Sequence
  chemically synthesized
gcgtccctttattccattcc

SEQ ID NO: 53250 - DNA, 20 bp, Artificial Sequence
  chemically synthesized
cctttattccattcccggcc

SEQ ID NO: 53251 - DNA, 20 bp, Artificial Sequence
  chemically synthesized
ctttattccattcccggcct

SEQ ID NO: 53252 - DNA, 20 bp, Artificial Sequence
  chemically synthesized
tattccattcccggcctggg

SEQ ID NO: 53253 - DNA, 20 bp, Artificial Sequence
  chemically synthesized
attccattcccggcctgggc

SEQ ID NO: 53254 - DNA, 20 bp, Artificial Sequence
  chemically synthesized
cattcccggcctgggcgggc

SEQ ID NO: 53255 - DNA, 20 bp, Artificial Sequence
  chemically synthesized
attcccggcctgggcgggct

SEQ ID NO: 53256 - DNA, 20 bp, Artificial Sequence
  chemically synthesized
tttgacctcccgtgtttgtg

SEQ ID NO: 53257 - DNA, 20 bp, Artificial Sequence
  chemically synthesized
acctcccgtgtttgtgcagc

SEQ ID NO: 53258 - DNA, 20 bp, Artificial Sequence
  chemically synthesized
cctcccgtgtttgtgcagcc

SEQ ID NO: 53259 - DNA, 20 bp, Artificial Sequence
  chemically synthesized
cactgatcacctcattttct

SEQ ID NO: 53260 - DNA, 20 bp, Artificial Sequence
  chemically synthesized
tcacctcattttctgagctc

SEQ ID NO: 53261 - DNA, 20 bp, Artificial Sequence
  chemically synthesized
acctcattttctgagctctg

SEQ ID NO: 53262 - DNA, 20 bp, Artificial Sequence
  chemically synthesized
gagctctggagacgacccgc

SEQ ID NO: 53263 - DNA, 20 bp, Artificial Sequence
  chemically synthesized
ctctggagacgacccgcgag

SEQ ID NO: 53264 - DNA, 20 bp, Artificial Sequence
  chemically synthesized
tggagacgacccgcgagtgg

SEQ ID NO: 53265 - DNA, 20 bp, Artificial Sequence
  chemically synthesized
ggagacgacccgcgagtgga

SEQ ID NO: 53266 - DNA, 20 bp, Artificial Sequence
  chemically synthesized
agacgacccgcgagtggaag

SEQ ID NO: 53267 - DNA, 20 bp, Artificial Sequence
  chemically synthesized
acccgcgagtggaaggagtc

SEQ ID NO: 53268 - DNA, 20 bp, Artificial Sequence
  chemically synthesized
cgagtggaaggagtccagca

SEQ ID NO: 53269 - DNA, 20 bp, Artificial Sequence
  chemically synthesized
gtccagcacagaaatgttga

SEQ ID NO: 53270 - DNA, 20 bp, Artificial Sequence
  chemically synthesized
tccagcacagaaatgttgat

SEQ ID NO: 53271 - DNA, 20 bp, Artificial Sequence
  chemically synthesized
agcacagaaatgttgatggg

SEQ ID NO: 53272 - DNA, 20 bp, Artificial Sequence
  chemically synthesized
gcacagaaatgttgatggga

SEQ ID NO: 53273 - DNA, 20 bp, Artificial Sequence
  chemically synthesized
cacagaaatgttgatgggaa

SEQ ID NO: 53274 - DNA, 20 bp, Artificial Sequence
  chemically synthesized
tgttgatgggaagggacatg

SEQ ID NO: 53275 - DNA, 20 bp, Artificial Sequence
  chemically synthesized
aagggacatgaagcacaatg

SEQ ID NO: 53276 - DNA, 20 bp, Artificial Sequence
  chemically synthesized
caatgcagccattgtcatcg

SEQ ID NO: 53277 - DNA, 20 bp, Artificial Sequence
  chemically synthesized
cattgtcatcgcggctcgct

SEQ ID NO: 53278 - DNA, 20 bp, Artificial Sequence
  chemically synthesized
gtgctggactccttccactc

SEQ ID NO: 53279 - DNA, 20 bp, Artificial Sequence
  chemically synthesized
aaaatgaggtgatcagtggg

SEQ ID NO: 53280 - DNA, 20 bp, Artificial Sequence
  chemically synthesized
cagtgggacgagtaaggaag

SEQ ID NO: 53281 - DNA, 20 bp, Artificial Sequence
  chemically synthesized
gcgcccagcccgcccaggcc

SEQ ID NO: 53282 - DNA, 20 bp, Artificial Sequence
  chemically synthesized
cagcccgcccaggccgggaa

SEQ ID NO: 53283 - DNA, 20 bp, Artificial Sequence
  chemically synthesized
gcgccggaggctgcacagaa

SEQ ID NO: 53284 - DNA, 20 bp, Artificial Sequence
  chemically synthesized
ccctgctggtctgcgccgtc

SEQ ID NO: 53285 - DNA, 20 bp, Artificial Sequence
  chemically synthesized
gctggtctgcgccgtcctgg

SEQ ID NO: 53286 - DNA, 20 bp, Artificial Sequence
  chemically synthesized
gtcctgggtgagtgcgggca

SEQ ID NO: 53287 - DNA, 20 bp, Artificial Sequence
  chemically synthesized
gcgggcacggggtagcaccg

SEQ ID NO: 53288 - DNA, 20 bp, Artificial Sequence
  chemically synthesized
tccgcgctcaggctggaagc

SEQ ID NO: 53289 - DNA, 20 bp, Artificial Sequence
  chemically synthesized
caggctggaagcctgggtgt

SEQ ID NO: 53290 - DNA, 20 bp, Artificial Sequence
  chemically synthesized
agcatggcattcaaggcctc

SEQ ID NO: 53291 - DNA, 20 bp, Artificial Sequence
  chemically synthesized
ctttcagaggctgatgtccc

SEQ ID NO: 53292 - DNA, 20 bp, Artificial Sequence
  chemically synthesized
gccatcgagcggtcagagca

SEQ ID NO: 53293 - DNA, 20 bp, Artificial Sequence
  chemically synthesized
ggggtttgaagccagacttc

SEQ ID NO: 53294 - DNA, 20 bp, Artificial Sequence
  chemically synthesized
ggccggctcctcaccaggga

SEQ ID NO: 53295 - DNA, 20 bp, Artificial Sequence
  chemically synthesized
tcatcacagcacttgcctgg

SEQ ID NO: 53296 - DNA, 20 bp, Artificial Sequence
  chemically synthesized
cttgcctgggagggtcaaat

SEQ ID NO: 53297 - DNA, 20 bp, Artificial Sequence
  chemically synthesized
ggtcagcgaggtggcagatg

SEQ ID NO: 53298 - DNA, 20 bp, Artificial Sequence
  chemically synthesized
cacaggcttatgttgcctcc

SEQ ID NO: 53299 - DNA, 20 bp, Artificial Sequence
  chemically synthesized
catgggccaagagggaaaat

SEQ ID NO: 53300 - DNA, 20 bp, Artificial Sequence
  chemically synthesized
agagggaaaatgggggtcgc

SEQ ID NO: 53301 - DNA, 20 bp, Artificial Sequence
  chemically synthesized
gcctcctctccacaggcttt

SEQ ID NO: 53302 - DNA, 20 bp, Artificial Sequence
  chemically synthesized
gtggatcttcttcagagcca

SEQ ID NO: 53303 - DNA, 20 bp, Artificial Sequence
  chemically synthesized
ccttgctgtggtggcccaca

SEQ ID NO: 53304 - DNA, 20 bp, Artificial Sequence
  chemically synthesized
agggcaaaagctcatgtgat

SEQ ID NO: 53305 - DNA, 20 bp, Artificial Sequence
  chemically synthesized
gatgctgtctctgcaaccac

SEQ ID NO: 53306 - DNA, 20 bp, Artificial Sequence
  chemically synthesized
ggctggcttcagcttttttt

SEQ ID NO: 53307 - DNA, 20 bp, Artificial Sequence
  chemically synthesized
aaaaagtgtggtgaaaatgg

SEQ ID NO: 53308 - DNA, 20 bp, Artificial Sequence
  chemically synthesized
tggagacagaggggagactg

SEQ ID NO: 53309 - DNA, 20 bp, Artificial Sequence
  chemically synthesized
aggggagactgttgaatttg

SEQ ID NO: 53310 - DNA, 20 bp, Artificial Sequence
  chemically synthesized
ctaaacagagagcaacagac

SEQ ID NO: 53311 - DNA, 20 bp, Artificial Sequence
  chemically synthesized
ccctcaactactggccaaga

SEQ ID NO: 53312 - DNA, 20 bp, Artificial Sequence
  chemically synthesized
ggccaagaaggggtgtaact

SEQ ID NO: 53313 - DNA, 20 bp, Artificial Sequence
  chemically synthesized
atgttttcttcttttgtgcc

SEQ ID NO: 53314 - DNA, 20 bp, Artificial Sequence
  chemically synthesized
tgtgccctgagtagcagacc

SEQ ID NO: 53315 - DNA, 20 bp, Artificial Sequence
  chemically synthesized
ctggcttggccaacgacaag

SEQ ID NO: 53316 - DNA, 20 bp, Artificial Sequence
  chemically synthesized
caacgacaagcagggtgacc

SEQ ID NO: 53317 - DNA, 20 bp, Artificial Sequence
  chemically synthesized
aaaaaaaaaggcatcattct

SEQ ID NO: 53318 - DNA, 20 bp, Artificial Sequence
  chemically synthesized
gaggtagcaagccaatgtgt

SEQ ID NO: 53319 - DNA, 20 bp, Artificial Sequence
  chemically synthesized
cagtgatgggaggagacaag

SEQ ID NO: 53320 - DNA, 20 bp, Artificial Sequence
  chemically synthesized
ctgcacccctctggccagca

SEQ ID NO: 53321 - DNA, 20 bp, Artificial Sequence
  chemically synthesized
accttctattggctcagact

SEQ ID NO: 53322 - DNA, 20 bp, Artificial Sequence
  chemically synthesized
gccctgtagtgttcatggac

SEQ ID NO: 53323 - DNA, 20 bp, Artificial Sequence
  chemically synthesized
tgagaggaggacaggactga

SEQ ID NO: 53324 - DNA, 20 bp, Artificial Sequence
  chemically synthesized
gctgtctctccctcagcata

SEQ ID NO: 53325 - DNA, 20 bp, Artificial Sequence
  chemically synthesized
agcatgaggccactaagtgc

SEQ ID NO: 53326 - DNA, 20 bp, Artificial Sequence
  chemically synthesized
cacaagcaacactgggacca

SEQ ID NO: 53327 - DNA, 20 bp, Artificial Sequence
  chemically synthesized
gcaacactgggaccatcgga

SEQ ID NO: 53328 - DNA, 20 bp, Artificial Sequence
  chemically synthesized
ggcacaagttctactgcatt

SEQ ID NO: 53329 - DNA, 20 bp, Artificial Sequence
  chemically synthesized
gaccaccctctgctggccag

SEQ ID NO: 53330 - DNA, 20 bp, Artificial Sequence
  chemically synthesized
ctatggaaaaccagcggggg

SEQ ID NO: 53331 - DNA, 20 bp, Artificial Sequence
  chemically synthesized
ttgccatctttttgagaaga

SEQ ID NO: 53332 - DNA, 20 bp, Artificial Sequence
  chemically synthesized
agaagagggagtgagactca

SEQ ID NO: 53333 - DNA, 20 bp, Artificial Sequence
  chemically synthesized
gtcgttggccaagccaggcc

SEQ ID NO: 53334 - DNA, 20 bp, Artificial Sequence
  chemically synthesized
ggccaagccaggcctagaat

SEQ ID NO: 53335 - DNA, 20 bp, Artificial Sequence
  chemically synthesized
agaatctgggtctccagact

SEQ ID NO: 53336 - DNA, 20 bp, Artificial Sequence
  chemically synthesized
gcacaaaagaagaaaacatt

SEQ ID NO: 53337 - DNA, 20 bp, Artificial Sequence
  chemically synthesized
ccccttcttggccagtagtt

SEQ ID NO: 53338 - DNA, 20 bp, Artificial Sequence
  chemically synthesized
gttgagggtaaattaacgaa

SEQ ID NO: 53339 - DNA, 20 bp, Artificial Sequence
  chemically synthesized
aaaaaaagctgaagccagcc

SEQ ID NO: 53340 - DNA, 20 bp, Artificial Sequence
  chemically synthesized
agaggaggcccacagctctc

SEQ ID NO: 53341 - DNA, 20 bp, Artificial Sequence
  chemically synthesized
atgcatgaggaggggccacc

SEQ ID NO: 53342 - DNA, 20 bp, Artificial Sequence
  chemically synthesized
cctccacaaagccctgcctc

SEQ ID NO: 53343 - DNA, 20 bp, Artificial Sequence
  chemically synthesized
cctccagagttcccataggc

SEQ ID NO: 53344 - DNA, 20 bp, Artificial Sequence
  chemically synthesized
gcctgtgaagtgctctgtgc

SEQ ID NO: 53345 - DNA, 20 bp, Artificial Sequence
  chemically synthesized
ggggataaaggcaagtaacg

SEQ ID NO: 53346 - DNA, 20 bp, Artificial Sequence
  chemically synthesized
taacgtggggtcctctctca

SEQ ID NO: 53347 - DNA, 20 bp, Artificial Sequence
  chemically synthesized
aacagtgtgacaaatgcccc

SEQ ID NO: 53348 - DNA, 20 bp, Artificial Sequence
  chemically synthesized
catgaatggcaggcagaagt

SEQ ID NO: 53349 - DNA, 20 bp, Artificial Sequence
  chemically synthesized
ggccccacctcaggaggtcg

SEQ ID NO: 53350 - DNA, 20 bp, Artificial Sequence
  chemically synthesized
cgtcagccactgccccatag

SEQ ID NO: 53351 - DNA, 20 bp, Artificial Sequence
  chemically synthesized
ggtgaggagccggccaggac

SEQ ID NO: 53352 - DNA, 20 bp, Artificial Sequence
  chemically synthesized
gggacatcagcctctgaaag

SEQ ID NO: 53353 - DNA, 20 bp, Artificial Sequence
  chemically synthesized
atggtcagacccgggaggcc

SEQ ID NO: 53354 - DNA, 20 bp, Artificial Sequence
  chemically synthesized
aggccttgaatgccatgcta

SEQ ID NO: 53355 - DNA, 20 bp, Artificial Sequence
  chemically synthesized
cttgacaagaggcagcagca

SEQ ID NO: 53356 - DNA, 20 bp, Artificial Sequence
  chemically synthesized
aggaggagggggagaagaca

SEQ ID NO: 53357 - DNA, 20 bp, Artificial Sequence
  chemically synthesized
tagaagcccaagcaaaggcc

SEQ ID NO: 53358 - DNA, 20 bp, Artificial Sequence
  chemically synthesized
ccaggcttccagcctgagcg

SEQ ID NO: 53359 - DNA, 20 bp, Artificial Sequence
  chemically synthesized
gcaggctgcgcggtggccgc

SEQ ID NO: 53360 - DNA, 20 bp, Artificial Sequence
  chemically synthesized
cccacggcgagcctcatctt

SEQ ID NO: 53361 - DNA, 20 bp, Artificial Sequence
  chemically synthesized
gacctcccgtgtttgtgcag

SEQ ID NO: 53362 - DNA, 20 bp, Artificial Sequence
  chemically synthesized
ctgagctctggagacgaccc

SEQ ID NO: 53363 - DNA, 20 bp, Artificial Sequence
  chemically synthesized
ggagacgacccgcgagtgga

SEQ ID NO: 53364 - DNA, 20 bp, Artificial Sequence
  chemically synthesized
tcgcgggtcgtctccagagc

SEQ ID NO: 53365 - DNA, 20 bp, Artificial Sequence
  chemically synthesized
tggccaagaaggggtgtaac

SEQ ID NO: 53366 - DNA, 20 bp, Artificial Sequence
  chemically synthesized
aaccttctattggctcagac

SEQ ID NO: 53367 - DNA, 20 bp, Artificial Sequence
  chemically synthesized
ggtcccagtgttgcttgtgt

SEQ ID NO: 53368 - DNA, 20 bp, Artificial Sequence
  chemically synthesized
agggagagacagcatcgccc

SEQ ID NO: 53369 - DNA, 20 bp, Artificial Sequence
  chemically synthesized
gagaagagggagtgagactc

SEQ ID NO: 53370 - DNA, 20 bp, Artificial Sequence
  chemically synthesized
tgtcgttggccaagccaggc

SEQ ID NO: 53371 - DNA, 20 bp, Artificial Sequence
  chemically synthesized
ctgctactcagggcacaaaa

SEQ ID NO: 53372 - DNA, 20 bp, Artificial Sequence
  chemically synthesized
agttgagggtaaattaacga

SEQ ID NO: 53373 - DNA, 20 bp, Artificial Sequence
  chemically synthesized
gcctccagagttcccatagg

SEQ ID NO: 53374 - DNA, 20 bp, Artificial Sequence
  chemically synthesized
ggaattgctagcttatgggg

SEQ ID NO: 53375 - DNA, 20 bp, Artificial Sequence
  chemically synthesized
gcgagtggaaggagtccagc

SEQ ID NO: 53376 - DNA, 20 bp, Artificial Sequence
  chemically synthesized
agcacgtctaaccaggttat

SEQ ID NO: 53377 - DNA, 20 bp, Artificial Sequence
  chemically synthesized
gccaatgtgttggggtagct

SEQ ID NO: 53378 - DNA, 20 bp, Artificial Sequence
  chemically synthesized
ctgtgtctggctgtccctga

SEQ ID NO: 53379 - DNA, 20 bp, Artificial Sequence
  chemically synthesized
ggcttgctacctcaactatg

SEQ ID NO: 53380 - DNA, 20 bp, Artificial Sequence
  chemically synthesized
ctactcagggcacaaaagaa

SEQ ID NO: 53381 - DNA, 20 bp, Artificial Sequence
  chemically synthesized
ctctctgtttaggaagaact

SEQ ID NO: 53382 - DNA, 20 bp, Artificial Sequence
  chemically synthesized
attgctagcttatggggaga

SEQ ID NO: 53383 - DNA, 20 bp, Artificial Sequence
  chemically synthesized
ccgcgatgacaatggctgca

SEQ ID NO: 53384 - DNA, 20 bp, Artificial Sequence
  chemically synthesized
aggaaggggggttgggagag

SEQ ID NO: 53385 - DNA, 20 bp, Artificial Sequence
  chemically synthesized
gctgcacaaacacgggaggt

SEQ ID NO: 53386 - DNA, 20 bp, Artificial Sequence
  chemically synthesized
ctctacgccccacccctggc

SEQ ID NO: 53387 - DNA, 20 bp, Artificial Sequence
  chemically synthesized
gccccacccctggcctttgc

SEQ ID NO: 53388 - DNA, 20 bp, Artificial Sequence
  chemically synthesized
gccatcgagcggtcagagca

SEQ ID NO: 53389 - DNA, 20 bp, Artificial Sequence
  chemically synthesized
tggggcatttgtcacactgt

SEQ ID NO: 53390 - DNA, 20 bp, Artificial Sequence
  chemically synthesized
ttgtcacactgttggggctt

SEQ ID NO: 53391 - DNA, 20 bp, Artificial Sequence
  chemically synthesized
acactgttggggcttccacg

SEQ ID NO: 53392 - DNA, 20 bp, Artificial Sequence
  chemically synthesized
gcctatgggaactctggagg

SEQ ID NO: 53393 - DNA, 20 bp, Artificial Sequence
  chemically synthesized
ggctttgtggaggggctgcc

SEQ ID NO: 53394 - DNA, 20 bp, Artificial Sequence
  chemically synthesized
ccacaggcttatgttgcctc

SEQ ID NO: 53395 - DNA, 20 bp, Artificial Sequence
  chemically synthesized
gagctgtgggcctcctctcc

SEQ ID NO: 53396 - DNA, 20 bp, Artificial Sequence
  chemically synthesized
ggatgctgtctctgcaacca

SEQ ID NO: 53397 - DNA, 20 bp, Artificial Sequence
  chemically synthesized
gattttaatagttacccatg

SEQ ID NO: 53398 - DNA, 20 bp, Artificial Sequence
  chemically synthesized
aatagttacccatggctggc

SEQ ID NO: 53399 - DNA, 20 bp, Artificial Sequence
  chemically synthesized
aggggagactgttgaatttg

SEQ ID NO: 53400 - DNA, 20 bp, Artificial Sequence
  chemically synthesized
ccaagaaggggtgtaactca

SEQ ID NO: 53401 - DNA, 20 bp, Artificial Sequence
  chemically synthesized
gcagacccagagtctggaga

SEQ ID NO: 53402 - DNA, 20 bp, Artificial Sequence
  chemically synthesized
ctggagacccagattctagg

SEQ ID NO: 53403 - DNA, 20 bp, Artificial Sequence
  chemically synthesized
aagatggcaattcctccccc

SEQ ID NO: 53404 - DNA, 20 bp, Artificial Sequence
  chemically synthesized
tgaaaacgccctgtgcatac

SEQ ID NO: 53405 - DNA, 20 bp, Artificial Sequence
  chemically synthesized
agacaaggcggatacagagg

SEQ ID NO: 53406 - DNA, 20 bp, Artificial Sequence
  chemically synthesized
agcatgaggccactaagtgc

SEQ ID NO: 53407 - DNA, 20 bp, Artificial Sequence
  chemically synthesized
attccatccgatggtcccag

SEQ ID NO: 53408 - DNA, 20 bp, Artificial Sequence
  chemically synthesized
tgtgtgaagaaagcctccta

SEQ ID NO: 53409 - DNA, 20 bp, Artificial Sequence
  chemically synthesized
gccctgatgcaatcaaggta

SEQ ID NO: 53410 - DNA, 20 bp, Artificial Sequence
  chemically synthesized
actgggaccatcggatggaa

SEQ ID NO: 53411 - DNA, 20 bp, Artificial Sequence
  chemically synthesized
tccgacactgcacaccatct

SEQ ID NO: 53412 - DNA, 20 bp, Artificial Sequence
  chemically synthesized
gaaggttgccctaatggcct

SEQ ID NO: 53413 - DNA, 20 bp, Artificial Sequence
  chemically synthesized
cataagcctcagtatgcaca

SEQ ID NO: 53414 - DNA, 20 bp, Artificial Sequence
  chemically synthesized
gttttcagctaccccaacac

SEQ ID NO: 53415 - DNA, 20 bp, Artificial Sequence
  chemically synthesized
ttttttttaacccaaggtca

SEQ ID NO: 53416 - DNA, 20 bp, Artificial Sequence
  chemically synthesized
tgtaactcttgtctgttgct

SEQ ID NO: 53417 - DNA, 20 bp, Artificial Sequence
  chemically synthesized
agagacagcatccctatcac

SEQ ID NO: 53418 - DNA, 20 bp, Artificial Sequence
  chemically synthesized
gggtcctctctcaaggaatt

SEQ ID NO: 53419 - DNA, 20 bp, Artificial Sequence
  chemically synthesized
caggacttggatccaagaag

SEQ ID NO: 53420 - DNA, 20 bp, Artificial Sequence
  chemically synthesized
atgctctgaccgctcgatgg

SEQ ID NO: 53421 - DNA, 20 bp, Artificial Sequence
  chemically synthesized
cttgacaagaggcagcagca

SEQ ID NO: 53422 - DNA, 20 bp, Artificial Sequence
  chemically synthesized
tgataacctggttagacgtg

SEQ ID NO: 53423 - DNA, 20 bp, Artificial Sequence
  chemically synthesized
atttattgtatttcactgct

SEQ ID NO: 53424 - DNA, 20 bp, Artificial Sequence
  chemically synthesized
atggaaaggcacccagacac

SEQ ID NO: 53425 - DNA, 20 bp, Artificial Sequence
  chemically synthesized
tgagcagcgagcacagtcgg

SEQ ID NO: 53426 - DNA, 20 bp, Artificial Sequence
  chemically synthesized
tgggcgcaatctttgacctc

SEQ ID NO: 53427 - DNA, 22 bp, Artificial Sequence
  chemically synthesized
cattgtgcttcatgtcccttcc

SEQ ID NO: 53428 - DNA, 22 bp, Artificial Sequence
  chemically synthesized
tgcttcatgtcccttcccatca

SEQ ID NO: 53429 - DNA, 22 bp, Artificial Sequence
  chemically synthesized
catgtcccttcccatcaacatt

SEQ ID NO: 53430 - DNA, 22 bp, Artificial Sequence
  chemically synthesized
atgtcccttcccatcaacattt

SEQ ID NO: 53431 - DNA, 22 bp, Artificial Sequence
  chemically synthesized
cccatcaacatttctgtgctgg

SEQ ID NO: 53432 - DNA, 22 bp, Artificial Sequence
  chemically synthesized
ccatcaacatttctgtgctgga

SEQ ID NO: 53433 - DNA, 22 bp, Artificial Sequence
  chemically synthesized
ctgtgctggactccttccactc

SEQ ID NO: 53434 - DNA, 22 bp, Artificial Sequence
  chemically synthesized
tgtgctggactccttccactcg

SEQ ID NO: 53435 - DNA, 22 bp, Artificial Sequence
  chemically synthesized
tgctggactccttccactcgcg

SEQ ID NO: 53436 - DNA, 22 bp, Artificial Sequence
  chemically synthesized
gactccttccactcgcgggtcg

SEQ ID NO: 53437 - DNA, 22 bp, Artificial Sequence
  chemically synthesized
cttccactcgcgggtcgtctcc

SEQ ID NO: 53438 - DNA, 22 bp, Artificial Sequence
  chemically synthesized
ccactcgcgggtcgtctccaga

SEQ ID NO: 53439 - DNA, 22 bp, Artificial Sequence
  chemically synthesized
cactcgcgggtcgtctccagag

SEQ ID NO: 53440 - DNA, 22 bp, Artificial Sequence
  chemically synthesized
gcgggtcgtctccagagctcag

SEQ ID NO: 53441 - DNA, 22 bp, Artificial Sequence
  chemically synthesized
cagagctcagaaaatgaggtga

SEQ ID NO: 53442 - DNA, 22 bp, Artificial Sequence
  chemically synthesized
agaaaatgaggtgatcagtggg

SEQ ID NO: 53443 - DNA, 22 bp, Artificial Sequence
  chemically synthesized
ggagaggggcgattgggcaacc

SEQ ID NO: 53444 - DNA, 22 bp, Artificial Sequence
  chemically synthesized
ggcaacccggctgcacaaacac

SEQ ID NO: 53445 - DNA, 22 bp, Artificial Sequence
  chemically synthesized
cacaaacacgggaggtcaaaga

SEQ ID NO: 53446 - DNA, 22 bp, Artificial Sequence
  chemically synthesized
cgcccagcccgcccaggccggg

SEQ ID NO: 53447 - DNA, 22 bp, Artificial Sequence
  chemically synthesized
cacagaagcgagtccgactgtg

SEQ ID NO: 53448 - DNA, 22 bp, Artificial Sequence
  chemically synthesized
tgctcgctgctcagcgccgcac

SEQ ID NO: 53449 - DNA, 22 bp, Artificial Sequence
  chemically synthesized
gctgctcagcgccgcacccgga

SEQ ID NO: 53450 - DNA, 22 bp, Artificial Sequence
  chemically synthesized
ctcagcgccgcacccggaagat

SEQ ID NO: 53451 - DNA, 22 bp, Artificial Sequence
  chemically synthesized
agcgccgcacccggaagatgag

SEQ ID NO: 53452 - DNA, 22 bp, Artificial Sequence
  chemically synthesized
gccgtgggagccctgctggtct

SEQ ID NO: 53453 - DNA, 22 bp, Artificial Sequence
  chemically synthesized
ctggtctgcgccgtcctgggtg

SEQ ID NO: 53454 - DNA, 22 bp, Artificial Sequence
  chemically synthesized
gtctgcgccgtcctgggtgagt

SEQ ID NO: 53455 - DNA, 22 bp, Artificial Sequence
  chemically synthesized
cgccgtcctgggtgagtgcggg

SEQ ID NO: 53456 - DNA, 22 bp, Artificial Sequence
  chemically synthesized
ggtgagtgcgggcacggggtag

SEQ ID NO: 53457 - DNA, 22 bp, Artificial Sequence
  chemically synthesized
gcccgcgcgttccctgcaaccc

SEQ ID NO: 53458 - DNA, 22 bp, Artificial Sequence
  chemically synthesized
cctgcaacccgggcggccaccg

SEQ ID NO: 53459 - DNA, 22 bp, Artificial Sequence
  chemically synthesized
caacccgggcggccaccgcgca

SEQ ID NO: 53460 - DNA, 22 bp, Artificial Sequence
  chemically synthesized
catgcactccgcgctcaggctg

SEQ ID NO: 53461 - DNA, 22 bp, Artificial Sequence
  chemically synthesized
cgcgctcaggctggaagcctgg

SEQ ID NO: 53462 - DNA, 22 bp, Artificial Sequence
  chemically synthesized
aggctggaagcctgggtgtctg

SEQ ID NO: 53463 - DNA, 22 bp, Artificial Sequence
  chemically synthesized
gaagcctgggtgtctgggtgcc

SEQ ID NO: 53464 - DNA, 22 bp, Artificial Sequence
  chemically synthesized
ggtgtctgggtgcctttccatt

SEQ ID NO: 53465 - DNA, 22 bp, Artificial Sequence
  chemically synthesized
ggtgcctttccattgcctctct

SEQ ID NO: 53466 - DNA, 22 bp, Artificial Sequence
  chemically synthesized
tccattgcctctctacgcccca

SEQ ID NO: 53467 - DNA, 22 bp, Artificial Sequence
  chemically synthesized
ccattgcctctctacgccccac

SEQ ID NO: 53468 - DNA, 22 bp, Artificial Sequence
  chemically synthesized
cattgcctctctacgccccacc

SEQ ID NO: 53469 - DNA, 22 bp, Artificial Sequence
  chemically synthesized
cctctctacgccccacccctgg

SEQ ID NO: 53470 - DNA, 22 bp, Artificial Sequence
  chemically synthesized
tctacgccccacccctggcctt

SEQ ID NO: 53471 - DNA, 22 bp, Artificial Sequence
  chemically synthesized
tacgccccacccctggcctttg

SEQ ID NO: 53472 - DNA, 22 bp, Artificial Sequence
  chemically synthesized
cgccccacccctggcctttgct

SEQ ID NO: 53473 - DNA, 22 bp, Artificial Sequence
  chemically synthesized
gcctttgcttgggcttctagac

SEQ ID NO: 53474 - DNA, 22 bp, Artificial Sequence
  chemically synthesized
tgcttgggcttctagacacctt

SEQ ID NO: 53475 - DNA, 22 bp, Artificial Sequence
  chemically synthesized
gcttgggcttctagacaccttt

SEQ ID NO: 53476 - DNA, 22 bp, Artificial Sequence
  chemically synthesized
cttgggcttctagacacctttc

SEQ ID NO: 53477 - DNA, 22 bp, Artificial Sequence
  chemically synthesized
gggcttctagacacctttcact

SEQ ID NO: 53478 - DNA, 22 bp, Artificial Sequence
  chemically synthesized
ggcttctagacacctttcactg

SEQ ID NO: 53479 - DNA, 22 bp, Artificial Sequence
  chemically synthesized
ctagacacctttcactgcactc

SEQ ID NO: 53480 - DNA, 22 bp, Artificial Sequence
  chemically synthesized
tagacacctttcactgcactca

SEQ ID NO: 53481 - DNA, 22 bp, Artificial Sequence
  chemically synthesized
gacacctttcactgcactcact

SEQ ID NO: 53482 - DNA, 22 bp, Artificial Sequence
  chemically synthesized
tcactgcactcactgtcttctc

SEQ ID NO: 53483 - DNA, 22 bp, Artificial Sequence
  chemically synthesized
cactgcactcactgtcttctcc

SEQ ID NO: 53484 - DNA, 22 bp, Artificial Sequence
  chemically synthesized
actgcactcactgtcttctccc

SEQ ID NO: 53485 - DNA, 22 bp, Artificial Sequence
  chemically synthesized
cactcactgtcttctccccctc

SEQ ID NO: 53486 - DNA, 22 bp, Artificial Sequence
  chemically synthesized
actgtcttctccccctcctcct

SEQ ID NO: 53487 - DNA, 22 bp, Artificial Sequence
  chemically synthesized
tcttctccccctcctcctcttt

SEQ ID NO: 53488 - DNA, 22 bp, Artificial Sequence
  chemically synthesized
ctccccctcctcctctttgtcc

SEQ ID NO: 53489 - DNA, 22 bp, Artificial Sequence
  chemically synthesized
tccccctcctcctctttgtcca

SEQ ID NO: 53490 - DNA, 22 bp, Artificial Sequence
  chemically synthesized
cccctcctcctctttgtccagt

SEQ ID NO: 53491 - DNA, 22 bp, Artificial Sequence
  chemically synthesized
ctcctctttgtccagtaaatct

SEQ ID NO: 53492 - DNA, 22 bp, Artificial Sequence
  chemically synthesized
ctctttgtccagtaaatcttgc

SEQ ID NO: 53493 - DNA, 22 bp, Artificial Sequence
  chemically synthesized
tttgtccagtaaatcttgcagc

SEQ ID NO: 53494 - DNA, 22 bp, Artificial Sequence
  chemically synthesized
tgtccagtaaatcttgcagcag

SEQ ID NO: 53495 - DNA, 22 bp, Artificial Sequence
  chemically synthesized
gtccagtaaatcttgcagcagt

SEQ ID NO: 53496 - DNA, 22 bp, Artificial Sequence
  chemically synthesized
tccagtaaatcttgcagcagtg

SEQ ID NO: 53497 - DNA, 22 bp, Artificial Sequence
  chemically synthesized
gcagcagtgaaatacaataaat

SEQ ID NO: 53498 - DNA, 22 bp, Artificial Sequence
  chemically synthesized
cagcagtgaaatacaataaatc

SEQ ID NO: 53499 - DNA, 22 bp, Artificial Sequence
  chemically synthesized
accaggttatcaaaaccctttg

SEQ ID NO: 53500 - DNA, 22 bp, Artificial Sequence
  chemically synthesized
tcaaaaccctttgctgctgcct

SEQ ID NO: 53501 - DNA, 22 bp, Artificial Sequence
  chemically synthesized
tgctgctgcctcttgtcaagtc

SEQ ID NO: 53502 - DNA, 22 bp, Artificial Sequence
  chemically synthesized
gctgctgcctcttgtcaagtcc

SEQ ID NO: 53503 - DNA, 22 bp, Artificial Sequence
  chemically synthesized
ctgctgcctcttgtcaagtccg

SEQ ID NO: 53504 - DNA, 22 bp, Artificial Sequence
  chemically synthesized
ctgcctcttgtcaagtccgaac

SEQ ID NO: 53505 - DNA, 22 bp, Artificial Sequence
  chemically synthesized
cctcttgtcaagtccgaactcc

SEQ ID NO: 53506 - DNA, 22 bp, Artificial Sequence
  chemically synthesized
ttgtcaagtccgaactccttag

SEQ ID NO: 53507 - DNA, 22 bp, Artificial Sequence
  chemically synthesized
gtcaagtccgaactccttagca

SEQ ID NO: 53508 - DNA, 22 bp, Artificial Sequence
  chemically synthesized
tcaagtccgaactccttagcat

SEQ ID NO: 53509 - DNA, 22 bp, Artificial Sequence
  chemically synthesized
cttagcatggcattcaaggcct

SEQ ID NO: 53510 - DNA, 22 bp, Artificial Sequence
  chemically synthesized
agcatggcattcaaggcctccc

SEQ ID NO: 53511 - DNA, 22 bp, Artificial Sequence
  chemically synthesized
gcatggcattcaaggcctcccg

SEQ ID NO: 53512 - DNA, 22 bp, Artificial Sequence
  chemically synthesized
aaggcctcccgggtctgaccat

SEQ ID NO: 53513 - DNA, 22 bp, Artificial Sequence
  chemically synthesized
ccgggtctgaccattccccttt

SEQ ID NO: 53514 - DNA, 22 bp, Artificial Sequence
  chemically synthesized
accattcccctttcagaggctg

SEQ ID NO: 53515 - DNA, 22 bp, Artificial Sequence
  chemically synthesized
ccctttcagaggctgatgtccc

SEQ ID NO: 53516 - DNA, 22 bp, Artificial Sequence
  chemically synthesized
tcagaggctgatgtcccctggg

SEQ ID NO: 53517 - DNA, 22 bp, Artificial Sequence
  chemically synthesized
cagaggctgatgtcccctgggt

SEQ ID NO: 53518 - DNA, 22 bp, Artificial Sequence
  chemically synthesized
agaggctgatgtcccctgggtg

SEQ ID NO: 53519 - DNA, 22 bp, Artificial Sequence
  chemically synthesized
atgtcccctgggtgccctggga

SEQ ID NO: 53520 - DNA, 22 bp, Artificial Sequence
  chemically synthesized
ggtgccctgggagctgtagatg

SEQ ID NO: 53521 - DNA, 22 bp, Artificial Sequence
  chemically synthesized
ggagctgtagatgtcctgccaa

SEQ ID NO: 53522 - DNA, 22 bp, Artificial Sequence
  chemically synthesized
tagatgtcctgccaaggaagcg

SEQ ID NO: 53523 - DNA, 22 bp, Artificial Sequence
  chemically synthesized
ccaaggaagcggtgccatcgag

SEQ ID NO: 53524 - DNA, 22 bp, Artificial Sequence
  chemically synthesized
gaagccagacttcttggatcca

SEQ ID NO: 53525 - DNA, 22 bp, Artificial Sequence
  chemically synthesized
aagccagacttcttggatccaa

SEQ ID NO: 53526 - DNA, 22 bp, Artificial Sequence
  chemically synthesized
cttggatccaagtcctggccgg

SEQ ID NO: 53527 - DNA, 22 bp, Artificial Sequence
  chemically synthesized
ttggatccaagtcctggccggc

SEQ ID NO: 53528 - DNA, 22 bp, Artificial Sequence
  chemically synthesized
ggatccaagtcctggccggctc

SEQ ID NO: 53529 - DNA, 22 bp, Artificial Sequence
  chemically synthesized
gatccaagtcctggccggctcc

SEQ ID NO: 53530 - DNA, 22 bp, Artificial Sequence
  chemically synthesized
gccggctcctcaccagggaggg

SEQ ID NO: 53531 - DNA, 22 bp, Artificial Sequence
  chemically synthesized
ctcaccagggagggggtcatca

SEQ ID NO: 53532 - DNA, 22 bp, Artificial Sequence
  chemically synthesized
accagggagggggtcatcacag

SEQ ID NO: 53533 - DNA, 22 bp, Artificial Sequence
  chemically synthesized
gcctgggagggtcaaatgaggg

SEQ ID NO: 53534 - DNA, 22 bp, Artificial Sequence
  chemically synthesized
cctgggagggtcaaatgagggt

SEQ ID NO: 53535 - DNA, 22 bp, Artificial Sequence
  chemically synthesized
ggagggtcaaatgagggtcagc

SEQ ID NO: 53536 - DNA, 22 bp, Artificial Sequence
  chemically synthesized
agtaccagtggcagatgttgca

SEQ ID NO: 53537 - DNA, 22 bp, Artificial Sequence
  chemically synthesized
cacacatcctgctatggggcag

SEQ ID NO: 53538 - DNA, 22 bp, Artificial Sequence
  chemically synthesized
ctatggggcagtggctgacgcc

SEQ ID NO: 53539 - DNA, 22 bp, Artificial Sequence
  chemically synthesized
tggggcagtggctgacgccaca

SEQ ID NO: 53540 - DNA, 22 bp, Artificial Sequence
  chemically synthesized
acgccacactccccgacctcct

SEQ ID NO: 53541 - DNA, 22 bp, Artificial Sequence
  chemically synthesized
cccgacctcctgaggtggggcc

SEQ ID NO: 53542 - DNA, 22 bp, Artificial Sequence
  chemically synthesized
ctgaggtggggcccccttcata

SEQ ID NO: 53543 - DNA, 22 bp, Artificial Sequence
  chemically synthesized
aggtggggcccccttcatactc

SEQ ID NO: 53544 - DNA, 22 bp, Artificial Sequence
  chemically synthesized
catactctaacttctgcctgcc

SEQ ID NO: 53545 - DNA, 22 bp, Artificial Sequence
  chemically synthesized
atactctaacttctgcctgcca

SEQ ID NO: 53546 - DNA, 22 bp, Artificial Sequence
  chemically synthesized
taacttctgcctgccattcatg

SEQ ID NO: 53547 - DNA, 22 bp, Artificial Sequence
  chemically synthesized
acttctgcctgccattcatggg

SEQ ID NO: 53548 - DNA, 22 bp, Artificial Sequence
  chemically synthesized
ctgcctgccattcatggggcat

SEQ ID NO: 53549 - DNA, 22 bp, Artificial Sequence
  chemically synthesized
tgcctgccattcatggggcatt

SEQ ID NO: 53550 - DNA, 22 bp, Artificial Sequence
  chemically synthesized
cctgccattcatggggcatttg

SEQ ID NO: 53551 - DNA, 22 bp, Artificial Sequence
  chemically synthesized
ccattcatggggcatttgtcac

SEQ ID NO: 53552 - DNA, 22 bp, Artificial Sequence
  chemically synthesized
atggggcatttgtcacactgtt

SEQ ID NO: 53553 - DNA, 22 bp, Artificial Sequence
  chemically synthesized
gtcacactgttggggcttccac

SEQ ID NO: 53554 - DNA, 22 bp, Artificial Sequence
  chemically synthesized
tcacactgttggggcttccacg

SEQ ID NO: 53555 - DNA, 22 bp, Artificial Sequence
  chemically synthesized
ttggggcttccacgtttagttt

SEQ ID NO: 53556 - DNA, 22 bp, Artificial Sequence
  chemically synthesized
gggcttccacgtttagttttct

SEQ ID NO: 53557 - DNA, 22 bp, Artificial Sequence
  chemically synthesized
ccacgtttagttttctctcccc

SEQ ID NO: 53558 - DNA, 22 bp, Artificial Sequence
  chemically synthesized
cacgtttagttttctctcccca

SEQ ID NO: 53559 - DNA, 22 bp, Artificial Sequence
  chemically synthesized
agttttctctccccataagcta

SEQ ID NO: 53560 - DNA, 22 bp, Artificial Sequence
  chemically synthesized
gttttctctccccataagctag

SEQ ID NO: 53561 - DNA, 22 bp, Artificial Sequence
  chemically synthesized
tctctccccataagctagcaat

SEQ ID NO: 53562 - DNA, 22 bp, Artificial Sequence
  chemically synthesized
ctctccccataagctagcaatt

SEQ ID NO: 53563 - DNA, 22 bp, Artificial Sequence
  chemically synthesized
tctccccataagctagcaattc

SEQ ID NO: 53564 - DNA, 22 bp, Artificial Sequence
  chemically synthesized
tccccataagctagcaattcct

SEQ ID NO: 53565 - DNA, 22 bp, Artificial Sequence
  chemically synthesized
cccataagctagcaattccttg

SEQ ID NO: 53566 - DNA, 22 bp, Artificial Sequence
  chemically synthesized
gcaattccttgagagaggaccc

SEQ ID NO: 53567 - DNA, 22 bp, Artificial Sequence
  chemically synthesized
cttgagagaggaccccacgtta

SEQ ID NO: 53568 - DNA, 22 bp, Artificial Sequence
  chemically synthesized
gagagaggaccccacgttactt

SEQ ID NO: 53569 - DNA, 22 bp, Artificial Sequence
  chemically synthesized
agagaggaccccacgttacttg

SEQ ID NO: 53570 - DNA, 22 bp, Artificial Sequence
  chemically synthesized
cttgcctttatccccgcacaga

SEQ ID NO: 53571 - DNA, 22 bp, Artificial Sequence
  chemically synthesized
gcctttatccccgcacagagca

SEQ ID NO: 53572 - DNA, 22 bp, Artificial Sequence
  chemically synthesized
cctttatccccgcacagagcac

SEQ ID NO: 53573 - DNA, 22 bp, Artificial Sequence
  chemically synthesized
tatccccgcacagagcacttca

SEQ ID NO: 53574 - DNA, 22 bp, Artificial Sequence
  chemically synthesized
atccccgcacagagcacttcac

SEQ ID NO: 53575 - DNA, 22 bp, Artificial Sequence
  chemically synthesized
tccccgcacagagcacttcaca

SEQ ID NO: 53576 - DNA, 22 bp, Artificial Sequence
  chemically synthesized
cacaggctgtgcaaggtaatgc

SEQ ID NO: 53577 - DNA, 22 bp, Artificial Sequence
  chemically synthesized
acaggctgtgcaaggtaatgct

SEQ ID NO: 53578 - DNA, 22 bp, Artificial Sequence
  chemically synthesized
tgcaaggtaatgctccactgag

SEQ ID NO: 53579 - DNA, 22 bp, Artificial Sequence
  chemically synthesized
cactgaggacacattctcgcct

SEQ ID NO: 53580 - DNA, 22 bp, Artificial Sequence
  chemically synthesized
aggacacattctcgcctatggg

SEQ ID NO: 53581 - DNA, 22 bp, Artificial Sequence
  chemically synthesized
tcgcctatgggaactctggagg

SEQ ID NO: 53582 - DNA, 22 bp, Artificial Sequence
  chemically synthesized
gcctatgggaactctggaggca

SEQ ID NO: 53583 - DNA, 22 bp, Artificial Sequence
  chemically synthesized
tgggaactctggaggcagggct

SEQ ID NO: 53584 - DNA, 22 bp, Artificial Sequence
  chemically synthesized
tggaggcagggctttgtggagg

SEQ ID NO: 53585 - DNA, 22 bp, Artificial Sequence
  chemically synthesized
gaggcagggctttgtggagggg

SEQ ID NO: 53586 - DNA, 22 bp, Artificial Sequence
  chemically synthesized
tgtggaggggctgccacaggct

SEQ ID NO: 53587 - DNA, 22 bp, Artificial Sequence
  chemically synthesized
gtggaggggctgccacaggctt

SEQ ID NO: 53588 - DNA, 22 bp, Artificial Sequence
  chemically synthesized
tggaggggctgccacaggctta

SEQ ID NO: 53589 - DNA, 22 bp, Artificial Sequence
  chemically synthesized
ccacaggcttatgttgcctcct

SEQ ID NO: 53590 - DNA, 22 bp, Artificial Sequence
  chemically synthesized
atgttgcctcctaggatttccc

SEQ ID NO: 53591 - DNA, 22 bp, Artificial Sequence
  chemically synthesized
tgttgcctcctaggatttccca

SEQ ID NO: 53592 - DNA, 22 bp, Artificial Sequence
  chemically synthesized
cctcctaggatttcccatgggc

SEQ ID NO: 53593 - DNA, 22 bp, Artificial Sequence
  chemically synthesized
ctaggatttcccatgggccaag

SEQ ID NO: 53594 - DNA, 22 bp, Artificial Sequence
  chemically synthesized
ggatttcccatgggccaagagg

SEQ ID NO: 53595 - DNA, 22 bp, Artificial Sequence
  chemically synthesized
cccatgggccaagagggaaaat

SEQ ID NO: 53596 - DNA, 22 bp, Artificial Sequence
  chemically synthesized
ccatgggccaagagggaaaatg

SEQ ID NO: 53597 - DNA, 22 bp, Artificial Sequence
  chemically synthesized
gggtggccatccctggtggccc

SEQ ID NO: 53598 - DNA, 22 bp, Artificial Sequence
  chemically synthesized
gtggcccctcctcatgcatcct

SEQ ID NO: 53599 - DNA, 22 bp, Artificial Sequence
  chemically synthesized
ctcatgcatcctggagagctgt

SEQ ID NO: 53600 - DNA, 22 bp, Artificial Sequence
  chemically synthesized
atgcatcctggagagctgtggg

SEQ ID NO: 53601 - DNA, 22 bp, Artificial Sequence
  chemically synthesized
gagagctgtgggcctcctctcc

SEQ ID NO: 53602 - DNA, 22 bp, Artificial Sequence
  chemically synthesized
tgggcctcctctccacaggctt

SEQ ID NO: 53603 - DNA, 22 bp, Artificial Sequence
  chemically synthesized
ctctccacaggctttgtggatc

SEQ ID NO: 53604 - DNA, 22 bp, Artificial Sequence
  chemically synthesized
tccacaggctttgtggatcttc

SEQ ID NO: 53605 - DNA, 22 bp, Artificial Sequence
  chemically synthesized
cacaggctttgtggatcttctt

SEQ ID NO: 53606 - DNA, 22 bp, Artificial Sequence
  chemically synthesized
tgtggatcttcttcagagccag

SEQ ID NO: 53607 - DNA, 22 bp, Artificial Sequence
  chemically synthesized
gtggatcttcttcagagccagt

SEQ ID NO: 53608 - DNA, 22 bp, Artificial Sequence
  chemically synthesized
tggatcttcttcagagccagtg

SEQ ID NO: 53609 - DNA, 22 bp, Artificial Sequence
  chemically synthesized
cttcagagccagtgagtcagcc

SEQ ID NO: 53610 - DNA, 22 bp, Artificial Sequence
  chemically synthesized
ttcagagccagtgagtcagcct

SEQ ID NO: 53611 - DNA, 22 bp, Artificial Sequence
  chemically synthesized
cagagccagtgagtcagccttg

SEQ ID NO: 53612 - DNA, 22 bp, Artificial Sequence
  chemically synthesized
agagccagtgagtcagccttgc

SEQ ID NO: 53613 - DNA, 22 bp, Artificial Sequence
  chemically synthesized
gctgtggtggcccacaaggagt

SEQ ID NO: 53614 - DNA, 22 bp, Artificial Sequence
  chemically synthesized
ctgtggtggcccacaaggagtg

SEQ ID NO: 53615 - DNA, 22 bp, Artificial Sequence
  chemically synthesized
tggtggcccacaaggagtggag

SEQ ID NO: 53616 - DNA, 22 bp, Artificial Sequence
  chemically synthesized
ggggacagggcaaaagctcatg

SEQ ID NO: 53617 - DNA, 22 bp, Artificial Sequence
  chemically synthesized
gggacagggcaaaagctcatgt

SEQ ID NO: 53618 - DNA, 22 bp, Artificial Sequence
  chemically synthesized
atgtgatagggatgctgtctct

SEQ ID NO: 53619 - DNA, 22 bp, Artificial Sequence
  chemically synthesized
tctctgcaaccacatggatttt

SEQ ID NO: 53620 - DNA, 22 bp, Artificial Sequence
  chemically synthesized
tgcaaccacatggattttaata

SEQ ID NO: 53621 - DNA, 22 bp, Artificial Sequence
  chemically synthesized
caaccacatggattttaatagt

SEQ ID NO: 53622 - DNA, 22 bp, Artificial Sequence
  chemically synthesized
taatagttacccatggctggct

SEQ ID NO: 53623 - DNA, 22 bp, Artificial Sequence
  chemically synthesized
aatagttacccatggctggctt

SEQ ID NO: 53624 - DNA, 22 bp, Artificial Sequence
  chemically synthesized
atagttacccatggctggcttc

SEQ ID NO: 53625 - DNA, 22 bp, Artificial Sequence
  chemically synthesized
cccatggctggcttcagctttt

SEQ ID NO: 53626 - DNA, 22 bp, Artificial Sequence
  chemically synthesized
gcttcagctttttttgtgaatg

SEQ ID NO: 53627 - DNA, 22 bp, Artificial Sequence
  chemically synthesized
cagctttttttgtgaatggcag

SEQ ID NO: 53628 - DNA, 22 bp, Artificial Sequence
  chemically synthesized
agctttttttgtgaatggcagc

SEQ ID NO: 53629 - DNA, 22 bp, Artificial Sequence
  chemically synthesized
tttttgtgaatggcagccaaaa

SEQ ID NO: 53630 - DNA, 22 bp, Artificial Sequence
  chemically synthesized
ttttgtgaatggcagccaaaaa

SEQ ID NO: 53631 - DNA, 22 bp, Artificial Sequence
  chemically synthesized
tttgtgaatggcagccaaaaag

SEQ ID NO: 53632 - DNA, 22 bp, Artificial Sequence
  chemically synthesized
ttgtgaatggcagccaaaaagt

SEQ ID NO: 53633 - DNA, 22 bp, Artificial Sequence
  chemically synthesized
tgtgaatggcagccaaaaagtg

SEQ ID NO: 53634 - DNA, 22 bp, Artificial Sequence
  chemically synthesized
gtgaatggcagccaaaaagtgt

SEQ ID NO: 53635 - DNA, 22 bp, Artificial Sequence
  chemically synthesized
tgaatggcagccaaaaagtgtg

SEQ ID NO: 53636 - DNA, 22 bp, Artificial Sequence
  chemically synthesized
agtggagacagaggggagactg

SEQ ID NO: 53637 - DNA, 22 bp, Artificial Sequence
  chemically synthesized
ttgaatttgtggagtttttagt

SEQ ID NO: 53638 - DNA, 22 bp, Artificial Sequence
  chemically synthesized
aatttgtggagtttttagttct

SEQ ID NO: 53639 - DNA, 22 bp, Artificial Sequence
  chemically synthesized
gtggagtttttagttcttccta

SEQ ID NO: 53640 - DNA, 22 bp, Artificial Sequence
  chemically synthesized
tggagtttttagttcttcctaa

SEQ ID NO: 53641 - DNA, 22 bp, Artificial Sequence
  chemically synthesized
ttagttcttcctaaacagagag

SEQ ID NO: 53642 - DNA, 22 bp, Artificial Sequence
  chemically synthesized
tagttcttcctaaacagagagc

SEQ ID NO: 53643 - DNA, 22 bp, Artificial Sequence
  chemically synthesized
agttcttcctaaacagagagca

SEQ ID NO: 53644 - DNA, 22 bp, Artificial Sequence
  chemically synthesized
gttcttcctaaacagagagcaa

SEQ ID NO: 53645 - DNA, 22 bp, Artificial Sequence
  chemically synthesized
ttcctaaacagagagcaacaga

SEQ ID NO: 53646 - DNA, 22 bp, Artificial Sequence
  chemically synthesized
cctaaacagagagcaacagaca

SEQ ID NO: 53647 - DNA, 22 bp, Artificial Sequence
  chemically synthesized
ctaaacagagagcaacagacaa

SEQ ID NO: 53648 - DNA, 22 bp, Artificial Sequence
  chemically synthesized
aacagagagcaacagacaagag

SEQ ID NO: 53649 - DNA, 22 bp, Artificial Sequence
  chemically synthesized
cagacaaattaattcttttcgt

SEQ ID NO: 53650 - DNA, 22 bp, Artificial Sequence
  chemically synthesized
attcttttcgttaatttaccct

SEQ ID NO: 53651 - DNA, 22 bp, Artificial Sequence
  chemically synthesized
ttttcgttaatttaccctcaac

SEQ ID NO: 53652 - DNA, 22 bp, Artificial Sequence
  chemically synthesized
ttcgttaatttaccctcaacta

SEQ ID NO: 53653 - DNA, 22 bp, Artificial Sequence
  chemically synthesized
tcgttaatttaccctcaactac

SEQ ID NO: 53654 - DNA, 22 bp, Artificial Sequence
  chemically synthesized
cgttaatttaccctcaactact

SEQ ID NO: 53655 - DNA, 22 bp, Artificial Sequence
  chemically synthesized
gttaatttaccctcaactactg

SEQ ID NO: 53656 - DNA, 22 bp, Artificial Sequence
  chemically synthesized
atttaccctcaactactggcca

SEQ ID NO: 53657 - DNA, 22 bp, Artificial Sequence
  chemically synthesized
accctcaactactggccaagaa

SEQ ID NO: 53658 - DNA, 22 bp, Artificial Sequence
  chemically synthesized
ccctcaactactggccaagaag

SEQ ID NO: 53659 - DNA, 22 bp, Artificial Sequence
  chemically synthesized
aactactggccaagaaggggtg

SEQ ID NO: 53660 - DNA, 22 bp, Artificial Sequence
  chemically synthesized
ctggccaagaaggggtgtaact

SEQ ID NO: 53661 - DNA, 22 bp, Artificial Sequence
  chemically synthesized
gccaagaaggggtgtaactcag

SEQ ID NO: 53662 - DNA, 22 bp, Artificial Sequence
  chemically synthesized
agaatgttttcttcttttgtgc

SEQ ID NO: 53663 - DNA, 22 bp, Artificial Sequence
  chemically synthesized
tcttcttttgtgccctgagtag

SEQ ID NO: 53664 - DNA, 22 bp, Artificial Sequence
  chemically synthesized
cttcttttgtgccctgagtagc

SEQ ID NO: 53665 - DNA, 22 bp, Artificial Sequence
  chemically synthesized
ttcttttgtgccctgagtagca

SEQ ID NO: 53666 - DNA, 22 bp, Artificial Sequence
  chemically synthesized
cttttgtgccctgagtagcaga

SEQ ID NO: 53667 - DNA, 22 bp, Artificial Sequence
  chemically synthesized
ttttgtgccctgagtagcagac

SEQ ID NO: 53668 - DNA, 22 bp, Artificial Sequence
  chemically synthesized
ttgtgccctgagtagcagaccc

SEQ ID NO: 53669 - DNA, 22 bp, Artificial Sequence
  chemically synthesized
tgtgccctgagtagcagaccca

SEQ ID NO: 53670 - DNA, 22 bp, Artificial Sequence
  chemically synthesized
gtgccctgagtagcagacccag

SEQ ID NO: 53671 - DNA, 22 bp, Artificial Sequence
  chemically synthesized
tgccctgagtagcagacccaga

SEQ ID NO: 53672 - DNA, 22 bp, Artificial Sequence
  chemically synthesized
agtagcagacccagagtctgga

SEQ ID NO: 53673 - DNA, 22 bp, Artificial Sequence
  chemically synthesized
gagacccagattctaggcctgg

SEQ ID NO: 53674 - DNA, 22 bp, Artificial Sequence
  chemically synthesized
taggcctggcttggccaacgac

SEQ ID NO: 53675 - DNA, 22 bp, Artificial Sequence
  chemically synthesized
ggcctggcttggccaacgacaa

SEQ ID NO: 53676 - DNA, 22 bp, Artificial Sequence
  chemically synthesized
gcttggccaacgacaagcaggg

SEQ ID NO: 53677 - DNA, 22 bp, Artificial Sequence
  chemically synthesized
ggccaacgacaagcagggtgac

SEQ ID NO: 53678 - DNA, 22 bp, Artificial Sequence
  chemically synthesized
gccaacgacaagcagggtgacc

SEQ ID NO: 53679 - DNA, 22 bp, Artificial Sequence
  chemically synthesized
gggttaaaaaaaaaaaaaggca

SEQ ID NO: 53680 - DNA, 22 bp, Artificial Sequence
  chemically synthesized
ggttaaaaaaaaaaaaaggcat

SEQ ID NO: 53681 - DNA, 22 bp, Artificial Sequence
  chemically synthesized
aaaaaaaaaaaaggcatcattc

SEQ ID NO: 53682 - DNA, 22 bp, Artificial Sequence
  chemically synthesized
tctgagtctcactccctcttct

SEQ ID NO: 53683 - DNA, 22 bp, Artificial Sequence
  chemically synthesized
tgagtctcactccctcttctca

SEQ ID NO: 53684 - DNA, 22 bp, Artificial Sequence
  chemically synthesized
agtctcactccctcttctcaaa

SEQ ID NO: 53685 - DNA, 22 bp, Artificial Sequence
  chemically synthesized
actccctcttctcaaaaagatg

SEQ ID NO: 53686 - DNA, 22 bp, Artificial Sequence
  chemically synthesized
cctcttctcaaaaagatggcaa

SEQ ID NO: 53687 - DNA, 22 bp, Artificial Sequence
  chemically synthesized
ttctcaaaaagatggcaattcc

SEQ ID NO: 53688 - DNA, 22 bp, Artificial Sequence
  chemically synthesized
ctcaaaaagatggcaattcctc

SEQ ID NO: 53689 - DNA, 22 bp, Artificial Sequence
  chemically synthesized
tcaaaaagatggcaattcctcc

SEQ ID NO: 53690 - DNA, 22 bp, Artificial Sequence
  chemically synthesized
aaaaagatggcaattcctcccc

SEQ ID NO: 53691 - DNA, 22 bp, Artificial Sequence
  chemically synthesized
ctcccccgctggttttccatag

SEQ ID NO: 53692 - DNA, 22 bp, Artificial Sequence
  chemically synthesized
ccccgctggttttccatagttg

SEQ ID NO: 53693 - DNA, 22 bp, Artificial Sequence
  chemically synthesized
gttttccatagttgaggtagca

SEQ ID NO: 53694 - DNA, 22 bp, Artificial Sequence
  chemically synthesized
tccatagttgaggtagcaagcc

SEQ ID NO: 53695 - DNA, 22 bp, Artificial Sequence
  chemically synthesized
ccatagttgaggtagcaagcca

SEQ ID NO: 53696 - DNA, 22 bp, Artificial Sequence
  chemically synthesized
catagttgaggtagcaagccaa

SEQ ID NO: 53697 - DNA, 22 bp, Artificial Sequence
  chemically synthesized
aggtagcaagccaatgtgttgg

SEQ ID NO: 53698 - DNA, 22 bp, Artificial Sequence
  chemically synthesized
gggtagctgaaaacgccctgtg

SEQ ID NO: 53699 - DNA, 22 bp, Artificial Sequence
  chemically synthesized
aaaacgccctgtgcatactgag

SEQ ID NO: 53700 - DNA, 22 bp, Artificial Sequence
  chemically synthesized
tgcatactgaggcttatgttcc

SEQ ID NO: 53701 - DNA, 22 bp, Artificial Sequence
  chemically synthesized
aggcttatgttccatggggggc

SEQ ID NO: 53702 - DNA, 22 bp, Artificial Sequence
  chemically synthesized
atgttccatggggggccagggg

SEQ ID NO: 53703 - DNA, 22 bp, Artificial Sequence
  chemically synthesized
tgttccatggggggccaggggc

SEQ ID NO: 53704 - DNA, 22 bp, Artificial Sequence
  chemically synthesized
catggggggccaggggccagga

SEQ ID NO: 53705 - DNA, 22 bp, Artificial Sequence
  chemically synthesized
tcatctccagctgggaggtgat

SEQ ID NO: 53706 - DNA, 22 bp, Artificial Sequence
  chemically synthesized
cagctgggaggtgatggccatg

SEQ ID NO: 53707 - DNA, 22 bp, Artificial Sequence
  chemically synthesized
ggaggtgatggccatgcctgca

SEQ ID NO: 53708 - DNA, 22 bp, Artificial Sequence
  chemically synthesized
cacccctctggccagcagaggg

SEQ ID NO: 53709 - DNA, 22 bp, Artificial Sequence
  chemically synthesized
tggccagcagagggtggtcagt

SEQ ID NO: 53710 - DNA, 22 bp, Artificial Sequence
  chemically synthesized
gccagcagagggtggtcagtag

SEQ ID NO: 53711 - DNA, 22 bp, Artificial Sequence
  chemically synthesized
ggaggccattagggcaaccttc

SEQ ID NO: 53712 - DNA, 22 bp, Artificial Sequence
  chemically synthesized
gggcaaccttctattggctcag

SEQ ID NO: 53713 - DNA, 22 bp, Artificial Sequence
  chemically synthesized
ctattggctcagactcagaatg

SEQ ID NO: 53714 - DNA, 22 bp, Artificial Sequence
  chemically synthesized
tattggctcagactcagaatgc

SEQ ID NO: 53715 - DNA, 22 bp, Artificial Sequence
  chemically synthesized
ttggctcagactcagaatgcag

SEQ ID NO: 53716 - DNA, 22 bp, Artificial Sequence
  chemically synthesized
gctcagactcagaatgcagtag

SEQ ID NO: 53717 - DNA, 22 bp, Artificial Sequence
  chemically synthesized
agactcagaatgcagtagaact

SEQ ID NO: 53718 - DNA, 22 bp, Artificial Sequence
  chemically synthesized
agaatgcagtagaacttgtgcc

SEQ ID NO: 53719 - DNA, 22 bp, Artificial Sequence
  chemically synthesized
gtgccctgtagtgttcatggac

SEQ ID NO: 53720 - DNA, 22 bp, Artificial Sequence
  chemically synthesized
tgccctgtagtgttcatggaca

SEQ ID NO: 53721 - DNA, 22 bp, Artificial Sequence
  chemically synthesized
tagtgttcatggacaggagtga

SEQ ID NO: 53722 - DNA, 22 bp, Artificial Sequence
  chemically synthesized
atggacaggagtgagaggagga

SEQ ID NO: 53723 - DNA, 22 bp, Artificial Sequence
  chemically synthesized
aggggatgtggctgtcaaggcc

SEQ ID NO: 53724 - DNA, 22 bp, Artificial Sequence
  chemically synthesized
tcaaggcctttctaggggcgat

SEQ ID NO: 53725 - DNA, 22 bp, Artificial Sequence
  chemically synthesized
tctaggggcgatgctgtctctc

SEQ ID NO: 53726 - DNA, 22 bp, Artificial Sequence
  chemically synthesized
ctaggggcgatgctgtctctcc

SEQ ID NO: 53727 - DNA, 22 bp, Artificial Sequence
  chemically synthesized
taggggcgatgctgtctctccc

SEQ ID NO: 53728 - DNA, 22 bp, Artificial Sequence
  chemically synthesized
ggggcgatgctgtctctccctc

SEQ ID NO: 53729 - DNA, 22 bp, Artificial Sequence
  chemically synthesized
tctctccctcagcatagggagt

SEQ ID NO: 53730 - DNA, 22 bp, Artificial Sequence
  chemically synthesized
tccctcagcatagggagtgggc

SEQ ID NO: 53731 - DNA, 22 bp, Artificial Sequence
  chemically synthesized
cctcagcatagggagtgggccc

SEQ ID NO: 53732 - DNA, 22 bp, Artificial Sequence
  chemically synthesized
agcatagggagtgggcccttcc

SEQ ID NO: 53733 - DNA, 22 bp, Artificial Sequence
  chemically synthesized
ccacctctggcctctctccccc

SEQ ID NO: 53734 - DNA, 22 bp, Artificial Sequence
  chemically synthesized
cacctctggcctctctccccca

SEQ ID NO: 53735 - DNA, 22 bp, Artificial Sequence
  chemically synthesized
tggcctctctcccccagggctg

SEQ ID NO: 53736 - DNA, 22 bp, Artificial Sequence
  chemically synthesized
gcctctctcccccagggctgtg

SEQ ID NO: 53737 - DNA, 22 bp, Artificial Sequence
  chemically synthesized
tctcccccagggctgtgtctgg

SEQ ID NO: 53738 - DNA, 22 bp, Artificial Sequence
  chemically synthesized
tcccccagggctgtgtctggct

SEQ ID NO: 53739 - DNA, 22 bp, Artificial Sequence
  chemically synthesized
ccccagggctgtgtctggctgt

SEQ ID NO: 53740 - DNA, 22 bp, Artificial Sequence
  chemically synthesized
tgtctggctgtccctgataaaa

SEQ ID NO: 53741 - DNA, 22 bp, Artificial Sequence
  chemically synthesized
gctgtccctgataaaactgtga

SEQ ID NO: 53742 - DNA, 22 bp, Artificial Sequence
  chemically synthesized
tccctgataaaactgtgagatg

SEQ ID NO: 53743 - DNA, 22 bp, Artificial Sequence
  chemically synthesized
ataaaactgtgagatggtgtgc

SEQ ID NO: 53744 - DNA, 22 bp, Artificial Sequence
  chemically synthesized
tgagatggtgtgcagtgtcgga

SEQ ID NO: 53745 - DNA, 22 bp, Artificial Sequence
  chemically synthesized
agtgccagagtttccgcgacca

SEQ ID NO: 53746 - DNA, 22 bp, Artificial Sequence
  chemically synthesized
ccgcgaccatatgaaaagcgtc

SEQ ID NO: 53747 - DNA, 22 bp, Artificial Sequence
  chemically synthesized
cgcgaccatatgaaaagcgtca

SEQ ID NO: 53748 - DNA, 22 bp, Artificial Sequence
  chemically synthesized
catccgatggtcccagtgttgc

SEQ ID NO: 53749 - DNA, 22 bp, Artificial Sequence
  chemically synthesized
cttgtgtgaagaaagcctccta

SEQ ID NO: 53750 - DNA, 22 bp, Artificial Sequence
  chemically synthesized
gtgtgaagaaagcctcctacct

SEQ ID NO: 53751 - DNA, 22 bp, Artificial Sequence
  chemically synthesized
tgtgaagaaagcctcctacctt

SEQ ID NO: 53752 - DNA, 22 bp, Artificial Sequence
  chemically synthesized
ctaccttgattgcatcagggcc

SEQ ID NO: 53753 - DNA, 22 bp, Artificial Sequence
  chemically synthesized
ccttgattgcatcagggccatt

SEQ ID NO: 53754 - DNA, 22 bp, Artificial Sequence
  chemically synthesized
atgcaatcaaggtaggaggctt

SEQ ID NO: 53755 - DNA, 22 bp, Artificial Sequence
  chemically synthesized
tcttcacacaagcaacactggg

SEQ ID NO: 53756 - DNA, 22 bp, Artificial Sequence
  chemically synthesized
cttcacacaagcaacactggga

SEQ ID NO: 53757 - DNA, 22 bp, Artificial Sequence
  chemically synthesized
ttcacacaagcaacactgggac

SEQ ID NO: 53758 - DNA, 22 bp, Artificial Sequence
  chemically synthesized
cacacaagcaacactgggacca

SEQ ID NO: 53759 - DNA, 22 bp, Artificial Sequence
  chemically synthesized
acacaagcaacactgggaccat

SEQ ID NO: 53760 - DNA, 22 bp, Artificial Sequence
  chemically synthesized
ggaccatcggatggaatgacgc

SEQ ID NO: 53761 - DNA, 22 bp, Artificial Sequence
  chemically synthesized
ttcatatggtcgcggaaactct

SEQ ID NO: 53762 - DNA, 22 bp, Artificial Sequence
  chemically synthesized
tcatatggtcgcggaaactctg

SEQ ID NO: 53763 - DNA, 22 bp, Artificial Sequence
  chemically synthesized
catatggtcgcggaaactctgg

SEQ ID NO: 53764 - DNA, 22 bp, Artificial Sequence
  chemically synthesized
atatggtcgcggaaactctggc

SEQ ID NO: 53765 - DNA, 22 bp, Artificial Sequence
  chemically synthesized
tggcacttagtggcctcatgct

SEQ ID NO: 53766 - DNA, 22 bp, Artificial Sequence
  chemically synthesized
gcacttagtggcctcatgctcc

SEQ ID NO: 53767 - DNA, 22 bp, Artificial Sequence
  chemically synthesized
agtggcctcatgctccgacact

SEQ ID NO: 53768 - DNA, 22 bp, Artificial Sequence
  chemically synthesized
gtggcctcatgctccgacactg

SEQ ID NO: 53769 - DNA, 22 bp, Artificial Sequence
  chemically synthesized
atgctccgacactgcacaccat

SEQ ID NO: 53770 - DNA, 22 bp, Artificial Sequence
  chemically synthesized
cgacactgcacaccatctcaca

SEQ ID NO: 53771 - DNA, 22 bp, Artificial Sequence
  chemically synthesized
cacaccatctcacagttttatc

SEQ ID NO: 53772 - DNA, 22 bp, Artificial Sequence
  chemically synthesized
acagttttatcagggacagcca

SEQ ID NO: 53773 - DNA, 22 bp, Artificial Sequence
  chemically synthesized
tatcagggacagccagacacag

SEQ ID NO: 53774 - DNA, 22 bp, Artificial Sequence
  chemically synthesized
atcagggacagccagacacagc

SEQ ID NO: 53775 - DNA, 22 bp, Artificial Sequence
  chemically synthesized
tcagggacagccagacacagcc

SEQ ID NO: 53776 - DNA, 22 bp, Artificial Sequence
  chemically synthesized
ggggagagaggccagaggtgga

SEQ ID NO: 53777 - DNA, 22 bp, Artificial Sequence
  chemically synthesized
cctatgctgagggagagacagc

SEQ ID NO: 53778 - DNA, 22 bp, Artificial Sequence
  chemically synthesized
tgctgagggagagacagcatcg

SEQ ID NO: 53779 - DNA, 22 bp, Artificial Sequence
  chemically synthesized
agggagagacagcatcgcccct

SEQ ID NO: 53780 - DNA, 22 bp, Artificial Sequence
  chemically synthesized
gaaaggccttgacagccacatc

SEQ ID NO: 53781 - DNA, 22 bp, Artificial Sequence
  chemically synthesized
gacagccacatcccctcagtcc

SEQ ID NO: 53782 - DNA, 22 bp, Artificial Sequence
  chemically synthesized
acagccacatcccctcagtcct

SEQ ID NO: 53783 - DNA, 22 bp, Artificial Sequence
  chemically synthesized
agtcctgtcctcctctcactcc

SEQ ID NO: 53784 - DNA, 22 bp, Artificial Sequence
  chemically synthesized
tcctcctctcactcctgtccat

SEQ ID NO: 53785 - DNA, 22 bp, Artificial Sequence
  chemically synthesized
ctctcactcctgtccatgaaca

SEQ ID NO: 53786 - DNA, 22 bp, Artificial Sequence
  chemically synthesized
tcactcctgtccatgaacacta

SEQ ID NO: 53787 - DNA, 22 bp, Artificial Sequence
  chemically synthesized
actcctgtccatgaacactaca

SEQ ID NO: 53788 - DNA, 22 bp, Artificial Sequence
  chemically synthesized
ctgtccatgaacactacagggc

SEQ ID NO: 53789 - DNA, 22 bp, Artificial Sequence
  chemically synthesized
tccatgaacactacagggcaca

SEQ ID NO: 53790 - DNA, 22 bp, Artificial Sequence
  chemically synthesized
cagggcacaagttctactgcat

SEQ ID NO: 53791 - DNA, 22 bp, Artificial Sequence
  chemically synthesized
tactgcattctgagtctgagcc

SEQ ID NO: 53792 - DNA, 22 bp, Artificial Sequence
  chemically synthesized
ctgcattctgagtctgagccaa

SEQ ID NO: 53793 - DNA, 22 bp, Artificial Sequence
  chemically synthesized
cattctgagtctgagccaatag

SEQ ID NO: 53794 - DNA, 22 bp, Artificial Sequence
  chemically synthesized
tgagtctgagccaatagaaggt

SEQ ID NO: 53795 - DNA, 22 bp, Artificial Sequence
  chemically synthesized
agtctgagccaatagaaggttg

SEQ ID NO: 53796 - DNA, 22 bp, Artificial Sequence
  chemically synthesized
agccaatagaaggttgccctaa

SEQ ID NO: 53797 - DNA, 22 bp, Artificial Sequence
  chemically synthesized
ccctaatggcctcccagtttcc

SEQ ID NO: 53798 - DNA, 22 bp, Artificial Sequence
  chemically synthesized
atggcctcccagtttcctactg

SEQ ID NO: 53799 - DNA, 22 bp, Artificial Sequence
  chemically synthesized
ccagtttcctactgaccaccct

SEQ ID NO: 53800 - DNA, 22 bp, Artificial Sequence
  chemically synthesized
cctactgaccaccctctgctgg

SEQ ID NO: 53801 - DNA, 22 bp, Artificial Sequence
  chemically synthesized
ctactgaccaccctctgctggc

SEQ ID NO: 53802 - DNA, 22 bp, Artificial Sequence
  chemically synthesized
ctgaccaccctctgctggccag

SEQ ID NO: 53803 - DNA, 22 bp, Artificial Sequence
  chemically synthesized
accaccctctgctggccagagg

SEQ ID NO: 53804 - DNA, 22 bp, Artificial Sequence
  chemically synthesized
tgctggccagaggggtgcaggc

SEQ ID NO: 53805 - DNA, 22 bp, Artificial Sequence
  chemically synthesized
ctggccagaggggtgcaggcat

SEQ ID NO: 53806 - DNA, 22 bp, Artificial Sequence
  chemically synthesized
gccagaggggtgcaggcatggc

SEQ ID NO: 53807 - DNA, 22 bp, Artificial Sequence
  chemically synthesized
ccagctggagatgacaatctgc

SEQ ID NO: 53808 - DNA, 22 bp, Artificial Sequence
  chemically synthesized
gagatgacaatctgctcctctg

SEQ ID NO: 53809 - DNA, 22 bp, Artificial Sequence
  chemically synthesized
ctcctctgtatccgccttgtct

SEQ ID NO: 53810 - DNA, 22 bp, Artificial Sequence
  chemically synthesized
ctctgtatccgccttgtctcct

SEQ ID NO: 53811 - DNA, 22 bp, Artificial Sequence
  chemically synthesized
tgtatccgccttgtctcctccc

SEQ ID NO: 53812 - DNA, 22 bp, Artificial Sequence
  chemically synthesized
tatccgccttgtctcctcccat

SEQ ID NO: 53813 - DNA, 22 bp, Artificial Sequence
  chemically synthesized
gtctcctcccatcactgtcctg

SEQ ID NO: 53814 - DNA, 22 bp, Artificial Sequence
  chemically synthesized
tctcctcccatcactgtcctgg

SEQ ID NO: 53815 - DNA, 22 bp, Artificial Sequence
  chemically synthesized
ctcccatcactgtcctggcccc

SEQ ID NO: 53816 - DNA, 22 bp, Artificial Sequence
  chemically synthesized
ccatcactgtcctggcccctgg

SEQ ID NO: 53817 - DNA, 22 bp, Artificial Sequence
  chemically synthesized
tcctggcccctggccccccatg

SEQ ID NO: 53818 - DNA, 22 bp, Artificial Sequence
  chemically synthesized
gcccctggccccccatggaaca

SEQ ID NO: 53819 - DNA, 22 bp, Artificial Sequence
  chemically synthesized
gccccccatggaacataagcct

SEQ ID NO: 53820 - DNA, 22 bp, Artificial Sequence
  chemically synthesized
agtatgcacagggcgttttcag

SEQ ID NO: 53821 - DNA, 22 bp, Artificial Sequence
  chemically synthesized
tcagctaccccaacacattggc

SEQ ID NO: 53822 - DNA, 22 bp, Artificial Sequence
  chemically synthesized
cagctaccccaacacattggct

SEQ ID NO: 53823 - DNA, 22 bp, Artificial Sequence
  chemically synthesized
agctaccccaacacattggctt

SEQ ID NO: 53824 - DNA, 22 bp, Artificial Sequence
  chemically synthesized
ccccaacacattggcttgctac

SEQ ID NO: 53825 - DNA, 22 bp, Artificial Sequence
  chemically synthesized
gcttgctacctcaactatggaa

SEQ ID NO: 53826 - DNA, 22 bp, Artificial Sequence
  chemically synthesized
gctacctcaactatggaaaacc

SEQ ID NO: 53827 - DNA, 22 bp, Artificial Sequence
  chemically synthesized
ctacctcaactatggaaaacca

SEQ ID NO: 53828 - DNA, 22 bp, Artificial Sequence
  chemically synthesized
cctcaactatggaaaaccagcg

SEQ ID NO: 53829 - DNA, 22 bp, Artificial Sequence
  chemically synthesized
aactatggaaaaccagcggggg

SEQ ID NO: 53830 - DNA, 22 bp, Artificial Sequence
  chemically synthesized
tggaaaaccagcgggggaggaa

SEQ ID NO: 53831 - DNA, 22 bp, Artificial Sequence
  chemically synthesized
ccatctttttgagaagagggag

SEQ ID NO: 53832 - DNA, 22 bp, Artificial Sequence
  chemically synthesized
tttgagaagagggagtgagact

SEQ ID NO: 53833 - DNA, 22 bp, Artificial Sequence
  chemically synthesized
ttgagaagagggagtgagactc

SEQ ID NO: 53834 - DNA, 22 bp, Artificial Sequence
  chemically synthesized
tgagaagagggagtgagactca

SEQ ID NO: 53835 - DNA, 22 bp, Artificial Sequence
  chemically synthesized
gagaagagggagtgagactcag

SEQ ID NO: 53836 - DNA, 22 bp, Artificial Sequence
  chemically synthesized
agaagagggagtgagactcaga

SEQ ID NO: 53837 - DNA, 22 bp, Artificial Sequence
  chemically synthesized
agagaatgatgccttttttttt

SEQ ID NO: 53838 - DNA, 22 bp, Artificial Sequence
  chemically synthesized
tttttttttttaacccaaggtc

SEQ ID NO: 53839 - DNA, 22 bp, Artificial Sequence
  chemically synthesized
ttttttttttaacccaaggtca

SEQ ID NO: 53840 - DNA, 22 bp, Artificial Sequence
  chemically synthesized
tttttttttaacccaaggtcac

SEQ ID NO: 53841 - DNA, 22 bp, Artificial Sequence
  chemically synthesized
ttttttttaacccaaggtcacc

SEQ ID NO: 53842 - DNA, 22 bp, Artificial Sequence
  chemically synthesized
tttttttaacccaaggtcaccc

SEQ ID NO: 53843 - DNA, 22 bp, Artificial Sequence
  chemically synthesized
ttttttaacccaaggtcaccct

SEQ ID NO: 53844 - DNA, 22 bp, Artificial Sequence
  chemically synthesized
tttttaacccaaggtcaccctg

SEQ ID NO: 53845 - DNA, 22 bp, Artificial Sequence
  chemically synthesized
ttttaacccaaggtcaccctgc

SEQ ID NO: 53846 - DNA, 22 bp, Artificial Sequence
  chemically synthesized
tttaacccaaggtcaccctgct

SEQ ID NO: 53847 - DNA, 22 bp, Artificial Sequence
  chemically synthesized
ttaacccaaggtcaccctgctt

SEQ ID NO: 53848 - DNA, 22 bp, Artificial Sequence
  chemically synthesized
taacccaaggtcaccctgcttg

SEQ ID NO: 53849 - DNA, 22 bp, Artificial Sequence
  chemically synthesized
aacccaaggtcaccctgcttgt

SEQ ID NO: 53850 - DNA, 22 bp, Artificial Sequence
  chemically synthesized
acccaaggtcaccctgcttgtc

SEQ ID NO: 53851 - DNA, 22 bp, Artificial Sequence
  chemically synthesized
cttgtcgttggccaagccaggc

SEQ ID NO: 53852 - DNA, 22 bp, Artificial Sequence
  chemically synthesized
gtcgttggccaagccaggccta

SEQ ID NO: 53853 - DNA, 22 bp, Artificial Sequence
  chemically synthesized
tcgttggccaagccaggcctag

SEQ ID NO: 53854 - DNA, 22 bp, Artificial Sequence
  chemically synthesized
gccaagccaggcctagaatctg

SEQ ID NO: 53855 - DNA, 22 bp, Artificial Sequence
  chemically synthesized
gaatctgggtctccagactctg

SEQ ID NO: 53856 - DNA, 22 bp, Artificial Sequence
  chemically synthesized
ggtctccagactctgggtctgc

SEQ ID NO: 53857 - DNA, 22 bp, Artificial Sequence
  chemically synthesized
cagactctgggtctgctactca

SEQ ID NO: 53858 - DNA, 22 bp, Artificial Sequence
  chemically synthesized
tgggtctgctactcagggcaca

SEQ ID NO: 53859 - DNA, 22 bp, Artificial Sequence
  chemically synthesized
ggtctgctactcagggcacaaa

SEQ ID NO: 53860 - DNA, 22 bp, Artificial Sequence
  chemically synthesized
ctactcagggcacaaaagaaga

SEQ ID NO: 53861 - DNA, 22 bp, Artificial Sequence
  chemically synthesized
ctcagggcacaaaagaagaaaa

SEQ ID NO: 53862 - DNA, 22 bp, Artificial Sequence
  chemically synthesized
agggcacaaaagaagaaaacat

SEQ ID NO: 53863 - DNA, 22 bp, Artificial Sequence
  chemically synthesized
tgagttacaccccttcttggcc

SEQ ID NO: 53864 - DNA, 22 bp, Artificial Sequence
  chemically synthesized
agttacaccccttcttggccag

SEQ ID NO: 53865 - DNA, 22 bp, Artificial Sequence
  chemically synthesized
caccccttcttggccagtagtt

SEQ ID NO: 53866 - DNA, 22 bp, Artificial Sequence
  chemically synthesized
cttggccagtagttgagggtaa

SEQ ID NO: 53867 - DNA, 22 bp, Artificial Sequence
  chemically synthesized
ttggccagtagttgagggtaaa

SEQ ID NO: 53868 - DNA, 22 bp, Artificial Sequence
  chemically synthesized
ggccagtagttgagggtaaatt

SEQ ID NO: 53869 - DNA, 22 bp, Artificial Sequence
  chemically synthesized
gccagtagttgagggtaaatta

SEQ ID NO: 53870 - DNA, 22 bp, Artificial Sequence
  chemically synthesized
agggtaaattaacgaaaagaat

SEQ ID NO: 53871 - DNA, 22 bp, Artificial Sequence
  chemically synthesized
acgaaaagaattaatttgtctg

SEQ ID NO: 53872 - DNA, 22 bp, Artificial Sequence
  chemically synthesized
atttgtctgtaactcttgtctg

SEQ ID NO: 53873 - DNA, 22 bp, Artificial Sequence
  chemically synthesized
gtctgtaactcttgtctgttgc

SEQ ID NO: 53874 - DNA, 22 bp, Artificial Sequence
  chemically synthesized
tctgtaactcttgtctgttgct

SEQ ID NO: 53875 - DNA, 22 bp, Artificial Sequence
  chemically synthesized
taactcttgtctgttgctctct

SEQ ID NO: 53876 - DNA, 22 bp, Artificial Sequence
  chemically synthesized
ttgtctgttgctctctgtttag

SEQ ID NO: 53877 - DNA, 22 bp, Artificial Sequence
  chemically synthesized
gtctgttgctctctgtttagga

SEQ ID NO: 53878 - DNA, 22 bp, Artificial Sequence
  chemically synthesized
tctgttgctctctgtttaggaa

SEQ ID NO: 53879 - DNA, 22 bp, Artificial Sequence
  chemically synthesized
ttgctctctgtttaggaagaac

SEQ ID NO: 53880 - DNA, 22 bp, Artificial Sequence
  chemically synthesized
ctctctgtttaggaagaactaa

SEQ ID NO: 53881 - DNA, 22 bp, Artificial Sequence
  chemically synthesized
tctgtttaggaagaactaaaaa

SEQ ID NO: 53882 - DNA, 22 bp, Artificial Sequence
  chemically synthesized
tgtttaggaagaactaaaaact

SEQ ID NO: 53883 - DNA, 22 bp, Artificial Sequence
  chemically synthesized
tttaggaagaactaaaaactcc

SEQ ID NO: 53884 - DNA, 22 bp, Artificial Sequence
  chemically synthesized
aggaagaactaaaaactccaca

SEQ ID NO: 53885 - DNA, 22 bp, Artificial Sequence
  chemically synthesized
ggaagaactaaaaactccacaa

SEQ ID NO: 53886 - DNA, 22 bp, Artificial Sequence
  chemically synthesized
aaaactccacaaattcaacagt

SEQ ID NO: 53887 - DNA, 22 bp, Artificial Sequence
  chemically synthesized
cacaaattcaacagtctcccct

SEQ ID NO: 53888 - DNA, 22 bp, Artificial Sequence
  chemically synthesized
aacagtctcccctctgtctcca

SEQ ID NO: 53889 - DNA, 22 bp, Artificial Sequence
  chemically synthesized
ccctctgtctccactgaactat

SEQ ID NO: 53890 - DNA, 22 bp, Artificial Sequence
  chemically synthesized
tgtctccactgaactatccctc

SEQ ID NO: 53891 - DNA, 22 bp, Artificial Sequence
  chemically synthesized
tctccactgaactatccctcca

SEQ ID NO: 53892 - DNA, 22 bp, Artificial Sequence
  chemically synthesized
cactgaactatccctccatttt

SEQ ID NO: 53893 - DNA, 22 bp, Artificial Sequence
  chemically synthesized
aactatccctccattttcacca

SEQ ID NO: 53894 - DNA, 22 bp, Artificial Sequence
  chemically synthesized
tccctccattttcaccacactt

SEQ ID NO: 53895 - DNA, 22 bp, Artificial Sequence
  chemically synthesized
cattttcaccacactttttggc

SEQ ID NO: 53896 - DNA, 22 bp, Artificial Sequence
  chemically synthesized
tcaccacactttttggctgcca

SEQ ID NO: 53897 - DNA, 22 bp, Artificial Sequence
  chemically synthesized
caccacactttttggctgccat

SEQ ID NO: 53898 - DNA, 22 bp, Artificial Sequence
  chemically synthesized
accacactttttggctgccatt

SEQ ID NO: 53899 - DNA, 22 bp, Artificial Sequence
  chemically synthesized
tttggctgccattcacaaaaaa

SEQ ID NO: 53900 - DNA, 22 bp, Artificial Sequence
  chemically synthesized
ttggctgccattcacaaaaaaa

SEQ ID NO: 53901 - DNA, 22 bp, Artificial Sequence
  chemically synthesized
tggctgccattcacaaaaaaag

SEQ ID NO: 53902 - DNA, 22 bp, Artificial Sequence
  chemically synthesized
ggctgccattcacaaaaaaagc

SEQ ID NO: 53903 - DNA, 22 bp, Artificial Sequence
  chemically synthesized
gctgccattcacaaaaaaagct

SEQ ID NO: 53904 - DNA, 22 bp, Artificial Sequence
  chemically synthesized
ccattcacaaaaaaagctgaag

SEQ ID NO: 53905 - DNA, 22 bp, Artificial Sequence
  chemically synthesized
acaaaaaaagctgaagccagcc

SEQ ID NO: 53906 - DNA, 22 bp, Artificial Sequence
  chemically synthesized
aagccagccatgggtaactatt

SEQ ID NO: 53907 - DNA, 22 bp, Artificial Sequence
  chemically synthesized
ttaaaatccatgtggttgcaga

SEQ ID NO: 53908 - DNA, 22 bp, Artificial Sequence
  chemically synthesized
aaatccatgtggttgcagagac

SEQ ID NO: 53909 - DNA, 22 bp, Artificial Sequence
  chemically synthesized
cagagacagcatccctatcaca

SEQ ID NO: 53910 - DNA, 22 bp, Artificial Sequence
  chemically synthesized
tcacatgagcttttgccctgtc

SEQ ID NO: 53911 - DNA, 22 bp, Artificial Sequence
  chemically synthesized
ttgccctgtccccaaggccctc

SEQ ID NO: 53912 - DNA, 22 bp, Artificial Sequence
  chemically synthesized
tgccctgtccccaaggccctct

SEQ ID NO: 53913 - DNA, 22 bp, Artificial Sequence
  chemically synthesized
gccctgtccccaaggccctctg

SEQ ID NO: 53914 - DNA, 22 bp, Artificial Sequence
  chemically synthesized
ccctgtccccaaggccctctgt

SEQ ID NO: 53915 - DNA, 22 bp, Artificial Sequence
  chemically synthesized
tccccaaggccctctgtcatct

SEQ ID NO: 53916 - DNA, 22 bp, Artificial Sequence
  chemically synthesized
tgtcatctccactccttgtggg

SEQ ID NO: 53917 - DNA, 22 bp, Artificial Sequence
  chemically synthesized
tcatctccactccttgtgggcc

SEQ ID NO: 53918 - DNA, 22 bp, Artificial Sequence
  chemically synthesized
cactccttgtgggccaccacag

SEQ ID NO: 53919 - DNA, 22 bp, Artificial Sequence
  chemically synthesized
cttgtgggccaccacagcaagg

SEQ ID NO: 53920 - DNA, 22 bp, Artificial Sequence
  chemically synthesized
gtgggccaccacagcaaggctg

SEQ ID NO: 53921 - DNA, 22 bp, Artificial Sequence
  chemically synthesized
tgggccaccacagcaaggctga

SEQ ID NO: 53922 - DNA, 22 bp, Artificial Sequence
  chemically synthesized
actcactggctctgaagaagat

SEQ ID NO: 53923 - DNA, 22 bp, Artificial Sequence
  chemically synthesized
actggctctgaagaagatccac

SEQ ID NO: 53924 - DNA, 22 bp, Artificial Sequence
  chemically synthesized
gctctgaagaagatccacaaag

SEQ ID NO: 53925 - DNA, 22 bp, Artificial Sequence
  chemically synthesized
tgaagaagatccacaaagcctg

SEQ ID NO: 53926 - DNA, 22 bp, Artificial Sequence
  chemically synthesized
aagaagatccacaaagcctgtg

SEQ ID NO: 53927 - DNA, 22 bp, Artificial Sequence
  chemically synthesized
tggagaggaggcccacagctct

SEQ ID NO: 53928 - DNA, 22 bp, Artificial Sequence
  chemically synthesized
tccaggatgcatgaggaggggc

SEQ ID NO: 53929 - DNA, 22 bp, Artificial Sequence
  chemically synthesized
caggatgcatgaggaggggcca

SEQ ID NO: 53930 - DNA, 22 bp, Artificial Sequence
  chemically synthesized
tccctcttggcccatgggaaat

SEQ ID NO: 53931 - DNA, 22 bp, Artificial Sequence
  chemically synthesized
ccctcttggcccatgggaaatc

SEQ ID NO: 53932 - DNA, 22 bp, Artificial Sequence
  chemically synthesized
cctcttggcccatgggaaatcc

SEQ ID NO: 53933 - DNA, 22 bp, Artificial Sequence
  chemically synthesized
ttggcccatgggaaatcctagg

SEQ ID NO: 53934 - DNA, 22 bp, Artificial Sequence
  chemically synthesized
ggcccatgggaaatcctaggag

SEQ ID NO: 53935 - DNA, 22 bp, Artificial Sequence
  chemically synthesized
gcccatgggaaatcctaggagg

SEQ ID NO: 53936 - DNA, 22 bp, Artificial Sequence
  chemically synthesized
ggaggcaacataagcctgtggc

SEQ ID NO: 53937 - DNA, 22 bp, Artificial Sequence
  chemically synthesized
tggcagcccctccacaaagccc

SEQ ID NO: 53938 - DNA, 22 bp, Artificial Sequence
  chemically synthesized
cacaaagccctgcctccagagt

SEQ ID NO: 53939 - DNA, 22 bp, Artificial Sequence
  chemically synthesized
cctccagagttcccataggcga

SEQ ID NO: 53940 - DNA, 22 bp, Artificial Sequence
  chemically synthesized
cagagttcccataggcgagaat

SEQ ID NO: 53941 - DNA, 22 bp, Artificial Sequence
  chemically synthesized
ccataggcgagaatgtgtcctc

SEQ ID NO: 53942 - DNA, 22 bp, Artificial Sequence
  chemically synthesized
agtggagcattaccttgcacag

SEQ ID NO: 53943 - DNA, 22 bp, Artificial Sequence
  chemically synthesized
ccttgcacagcctgtgaagtgc

SEQ ID NO: 53944 - DNA, 22 bp, Artificial Sequence
  chemically synthesized
gcacagcctgtgaagtgctctg

SEQ ID NO: 53945 - DNA, 22 bp, Artificial Sequence
  chemically synthesized
cacagcctgtgaagtgctctgt

SEQ ID NO: 53946 - DNA, 22 bp, Artificial Sequence
  chemically synthesized
tgaagtgctctgtgcggggata

SEQ ID NO: 53947 - DNA, 22 bp, Artificial Sequence
  chemically synthesized
tgtgcggggataaaggcaagta

SEQ ID NO: 53948 - DNA, 22 bp, Artificial Sequence
  chemically synthesized
tgcggggataaaggcaagtaac

SEQ ID NO: 53949 - DNA, 22 bp, Artificial Sequence
  chemically synthesized
tctcaaggaattgctagcttat

SEQ ID NO: 53950 - DNA, 22 bp, Artificial Sequence
  chemically synthesized
tcaaggaattgctagcttatgg

SEQ ID NO: 53951 - DNA, 22 bp, Artificial Sequence
  chemically synthesized
aaggaattgctagcttatgggg

SEQ ID NO: 53952 - DNA, 22 bp, Artificial Sequence
  chemically synthesized
ctagcttatggggagagaaaac

SEQ ID NO: 53953 - DNA, 22 bp, Artificial Sequence
  chemically synthesized
gcttatggggagagaaaactaa

SEQ ID NO: 53954 - DNA, 22 bp, Artificial Sequence
  chemically synthesized
atggggagagaaaactaaacgt

SEQ ID NO: 53955 - DNA, 22 bp, Artificial Sequence
  chemically synthesized
tggggagagaaaactaaacgtg

SEQ ID NO: 53956 - DNA, 22 bp, Artificial Sequence
  chemically synthesized
aacgtggaagccccaacagtgt

SEQ ID NO: 53957 - DNA, 22 bp, Artificial Sequence
  chemically synthesized
gagtatgaagggggccccacct

SEQ ID NO: 53958 - DNA, 22 bp, Artificial Sequence
  chemically synthesized
aggaggtcggggagtgtggcgt

SEQ ID NO: 53959 - DNA, 22 bp, Artificial Sequence
  chemically synthesized
ccccatagcaggatgtgtgcaa

SEQ ID NO: 53960 - DNA, 22 bp, Artificial Sequence
  chemically synthesized
ccactggtactcagcatctgcc

SEQ ID NO: 53961 - DNA, 22 bp, Artificial Sequence
  chemically synthesized
gtactcagcatctgccacctcg

SEQ ID NO: 53962 - DNA, 22 bp, Artificial Sequence
  chemically synthesized
agcatctgccacctcgctgacc

SEQ ID NO: 53963 - DNA, 22 bp, Artificial Sequence
  chemically synthesized
ccacctcgctgaccctcatttg

SEQ ID NO: 53964 - DNA, 22 bp, Artificial Sequence
  chemically synthesized
gctgaccctcatttgaccctcc

SEQ ID NO: 53965 - DNA, 22 bp, Artificial Sequence
  chemically synthesized
accctcatttgaccctcccagg

SEQ ID NO: 53966 - DNA, 22 bp, Artificial Sequence
  chemically synthesized
atttgaccctcccaggcaagtg

SEQ ID NO: 53967 - DNA, 22 bp, Artificial Sequence
  chemically synthesized
gaccctcccaggcaagtgctgt

SEQ ID NO: 53968 - DNA, 22 bp, Artificial Sequence
  chemically synthesized
accctcccaggcaagtgctgtg

SEQ ID NO: 53969 - DNA, 22 bp, Artificial Sequence
  chemically synthesized
ccaggcaagtgctgtgatgacc

SEQ ID NO: 53970 - DNA, 22 bp, Artificial Sequence
  chemically synthesized
tgatgaccccctccctggtgag

SEQ ID NO: 53971 - DNA, 22 bp, Artificial Sequence
  chemically synthesized
cctggtgaggagccggccagga

SEQ ID NO: 53972 - DNA, 22 bp, Artificial Sequence
  chemically synthesized
gtgaggagccggccaggacttg

SEQ ID NO: 53973 - DNA, 22 bp, Artificial Sequence
  chemically synthesized
ggatccaagaagtctggcttca

SEQ ID NO: 53974 - DNA, 22 bp, Artificial Sequence
  chemically synthesized
gatccaagaagtctggcttcaa

SEQ ID NO: 53975 - DNA, 22 bp, Artificial Sequence
  chemically synthesized
gcttcaaaccccatgctctgac

SEQ ID NO: 53976 - DNA, 22 bp, Artificial Sequence
  chemically synthesized
caaaccccatgctctgaccgct

SEQ ID NO: 53977 - DNA, 22 bp, Artificial Sequence
  chemically synthesized
aaaccccatgctctgaccgctc

SEQ ID NO: 53978 - DNA, 22 bp, Artificial Sequence
  chemically synthesized
tgaccgctcgatggcaccgctt

SEQ ID NO: 53979 - DNA, 22 bp, Artificial Sequence
  chemically synthesized
accgctcgatggcaccgcttcc

SEQ ID NO: 53980 - DNA, 22 bp, Artificial Sequence
  chemically synthesized
gatggcaccgcttccttggcag

SEQ ID NO: 53981 - DNA, 22 bp, Artificial Sequence
  chemically synthesized
ccttggcaggacatctacagct

SEQ ID NO: 53982 - DNA, 22 bp, Artificial Sequence
  chemically synthesized
cttggcaggacatctacagctc

SEQ ID NO: 53983 - DNA, 22 bp, Artificial Sequence
  chemically synthesized
ggcaggacatctacagctccca

SEQ ID NO: 53984 - DNA, 22 bp, Artificial Sequence
  chemically synthesized
gcaggacatctacagctcccag

SEQ ID NO: 53985 - DNA, 22 bp, Artificial Sequence
  chemically synthesized
cagctcccagggcacccagggg

SEQ ID NO: 53986 - DNA, 22 bp, Artificial Sequence
  chemically synthesized
ccagggcacccaggggacatca

SEQ ID NO: 53987 - DNA, 22 bp, Artificial Sequence
  chemically synthesized
tgaaaggggaatggtcagaccc

SEQ ID NO: 53988 - DNA, 22 bp, Artificial Sequence
  chemically synthesized
aaaggggaatggtcagacccgg

SEQ ID NO: 53989 - DNA, 22 bp, Artificial Sequence
  chemically synthesized
gaatgccatgctaaggagttcg

SEQ ID NO: 53990 - DNA, 22 bp, Artificial Sequence
  chemically synthesized
aatgccatgctaaggagttcgg

SEQ ID NO: 53991 - DNA, 22 bp, Artificial Sequence
  chemically synthesized
aggagttcggacttgacaagag

SEQ ID NO: 53992 - DNA, 22 bp, Artificial Sequence
  chemically synthesized
ggacttgacaagaggcagcagc

SEQ ID NO: 53993 - DNA, 22 bp, Artificial Sequence
  chemically synthesized
gacaagaggcagcagcaaaggg

SEQ ID NO: 53994 - DNA, 22 bp, Artificial Sequence
  chemically synthesized
acaagaggcagcagcaaagggt

SEQ ID NO: 53995 - DNA, 22 bp, Artificial Sequence
  chemically synthesized
tgataacctggttagacgtgct

SEQ ID NO: 53996 - DNA, 22 bp, Artificial Sequence
  chemically synthesized
gataacctggttagacgtgctc

SEQ ID NO: 53997 - DNA, 22 bp, Artificial Sequence
  chemically synthesized
ataacctggttagacgtgctct

SEQ ID NO: 53998 - DNA, 22 bp, Artificial Sequence
  chemically synthesized
gttagacgtgctctgatttatt

SEQ ID NO: 53999 - DNA, 22 bp, Artificial Sequence
  chemically synthesized
gacgtgctctgatttattgtat

SEQ ID NO: 54000 - DNA, 22 bp, Artificial Sequence
  chemically synthesized
tgatttattgtatttcactgct

SEQ ID NO: 54001 - DNA, 22 bp, Artificial Sequence
  chemically synthesized
atttattgtatttcactgctgc

SEQ ID NO: 54002 - DNA, 22 bp, Artificial Sequence
  chemically synthesized
attgtatttcactgctgcaaga

SEQ ID NO: 54003 - DNA, 22 bp, Artificial Sequence
  chemically synthesized
ttgtatttcactgctgcaagat

SEQ ID NO: 54004 - DNA, 22 bp, Artificial Sequence
  chemically synthesized
tatttcactgctgcaagattta

SEQ ID NO: 54005 - DNA, 22 bp, Artificial Sequence
  chemically synthesized
cactgctgcaagatttactgga

SEQ ID NO: 54006 - DNA, 22 bp, Artificial Sequence
  chemically synthesized
actgctgcaagatttactggac

SEQ ID NO: 54007 - DNA, 22 bp, Artificial Sequence
  chemically synthesized
ctgcaagatttactggacaaag

SEQ ID NO: 54008 - DNA, 22 bp, Artificial Sequence
  chemically synthesized
caagatttactggacaaagagg

SEQ ID NO: 54009 - DNA, 22 bp, Artificial Sequence
  chemically synthesized
actggacaaagaggaggagggg

SEQ ID NO: 54010 - DNA, 22 bp, Artificial Sequence
  chemically synthesized
ctggacaaagaggaggaggggg

SEQ ID NO: 54011 - DNA, 22 bp, Artificial Sequence
  chemically synthesized
gacaaagaggaggagggggaga

SEQ ID NO: 54012 - DNA, 22 bp, Artificial Sequence
  chemically synthesized
gaagcccaagcaaaggccaggg

SEQ ID NO: 54013 - DNA, 22 bp, Artificial Sequence
  chemically synthesized
ccagcctgagcgcggagtgcat

SEQ ID NO: 54014 - DNA, 22 bp, Artificial Sequence
  chemically synthesized
cagcctgagcgcggagtgcatg

SEQ ID NO: 54015 - DNA, 22 bp, Artificial Sequence
  chemically synthesized
agcgcggagtgcatgcaggctg

SEQ ID NO: 54016 - DNA, 22 bp, Artificial Sequence
  chemically synthesized
cgcggtggccgcccgggttgca

SEQ ID NO: 54017 - DNA, 22 bp, Artificial Sequence
  chemically synthesized
cagggaacgcgcgggccagcga

SEQ ID NO: 54018 - DNA, 22 bp, Artificial Sequence
  chemically synthesized
tgcggtgctaccccgtgcccgc

SEQ ID NO: 54019 - DNA, 22 bp, Artificial Sequence
  chemically synthesized
cggtgctaccccgtgcccgcac

SEQ ID NO: 54020 - DNA, 22 bp, Artificial Sequence
  chemically synthesized
ccccgtgcccgcactcacccag

SEQ ID NO: 54021 - DNA, 22 bp, Artificial Sequence
  chemically synthesized
acccaggacggcgcagaccagc

SEQ ID NO: 54022 - DNA, 22 bp, Artificial Sequence
  chemically synthesized
ccacggcgagcctcatcttccg

SEQ ID NO: 54023 - DNA, 22 bp, Artificial Sequence
  chemically synthesized
atcttccgggtgcggcgctgag

SEQ ID NO: 54024 - DNA, 22 bp, Artificial Sequence
  chemically synthesized
ccgggtgcggcgctgagcagcg

SEQ ID NO: 54025 - DNA, 22 bp, Artificial Sequence
  chemically synthesized
cgggtgcggcgctgagcagcga

SEQ ID NO: 54026 - DNA, 22 bp, Artificial Sequence
  chemically synthesized
agcagcgagcacagtcggactc

SEQ ID NO: 54027 - DNA, 22 bp, Artificial Sequence
  chemically synthesized
gcttctgtgcagcctccggcgc

SEQ ID NO: 54028 - DNA, 22 bp, Artificial Sequence
  chemically synthesized
ctgtgcagcctccggcgccccg

SEQ ID NO: 54029 - DNA, 22 bp, Artificial Sequence
  chemically synthesized
tgtgcagcctccggcgccccgc

SEQ ID NO: 54030 - DNA, 22 bp, Artificial Sequence
  chemically synthesized
tgcagcctccggcgccccgcgt

SEQ ID NO: 54031 - DNA, 22 bp, Artificial Sequence
  chemically synthesized
cggcgccccgcgtccctttatt

SEQ ID NO: 54032 - DNA, 22 bp, Artificial Sequence
  chemically synthesized
tattccattcccggcctgggcg

SEQ ID NO: 54033 - DNA, 22 bp, Artificial Sequence
  chemically synthesized
attccattcccggcctgggcgg

SEQ ID NO: 54034 - DNA, 22 bp, Artificial Sequence
  chemically synthesized
ttccattcccggcctgggcggg

SEQ ID NO: 54035 - DNA, 22 bp, Artificial Sequence
  chemically synthesized
cattcccggcctgggcgggctg

SEQ ID NO: 54036 - DNA, 22 bp, Artificial Sequence
  chemically synthesized
ccggcctgggcgggctgggcgc

SEQ ID NO: 54037 - DNA, 22 bp, Artificial Sequence
  chemically synthesized
ggcgggctgggcgcaatctttg

SEQ ID NO: 54038 - DNA, 22 bp, Artificial Sequence
  chemically synthesized
ggcgcaatctttgacctcccgt

SEQ ID NO: 54039 - DNA, 22 bp, Artificial Sequence
  chemically synthesized
tgacctcccgtgtttgtgcagc

SEQ ID NO: 54040 - DNA, 22 bp, Artificial Sequence
  chemically synthesized
gacctcccgtgtttgtgcagcc

SEQ ID NO: 54041 - DNA, 22 bp, Artificial Sequence
  chemically synthesized
acctcccgtgtttgtgcagccg

SEQ ID NO: 54042 - DNA, 22 bp, Artificial Sequence
  chemically synthesized
ccgtgtttgtgcagccgggttg

SEQ ID NO: 54043 - DNA, 22 bp, Artificial Sequence
  chemically synthesized
gtgcagccgggttgcccaatcg

SEQ ID NO: 54044 - DNA, 22 bp, Artificial Sequence
  chemically synthesized
tgcagccgggttgcccaatcgc

SEQ ID NO: 54045 - DNA, 22 bp, Artificial Sequence
  chemically synthesized
cccaatcgcccctctcccaacc

SEQ ID NO: 54046 - DNA, 22 bp, Artificial Sequence
  chemically synthesized
tcccaaccccccttccttactc

SEQ ID NO: 54047 - DNA, 22 bp, Artificial Sequence
  chemically synthesized
ccaaccccccttccttactcgt

SEQ ID NO: 54048 - DNA, 22 bp, Artificial Sequence
  chemically synthesized
ccttactcgtcccactgatcac

SEQ ID NO: 54049 - DNA, 22 bp, Artificial Sequence
  chemically synthesized
cttactcgtcccactgatcacc

SEQ ID NO: 54050 - DNA, 22 bp, Artificial Sequence
  chemically synthesized
actcgtcccactgatcacctca

SEQ ID NO: 54051 - DNA, 22 bp, Artificial Sequence
  chemically synthesized
ctcgtcccactgatcacctcat

SEQ ID NO: 54052 - DNA, 22 bp, Artificial Sequence
  chemically synthesized
gtcccactgatcacctcatttt

SEQ ID NO: 54053 - DNA, 22 bp, Artificial Sequence
  chemically synthesized
atcacctcattttctgagctct

SEQ ID NO: 54054 - DNA, 22 bp, Artificial Sequence
  chemically synthesized
attttctgagctctggagacga

SEQ ID NO: 54055 - DNA, 22 bp, Artificial Sequence
  chemically synthesized
tctgagctctggagacgacccg

SEQ ID NO: 54056 - DNA, 22 bp, Artificial Sequence
  chemically synthesized
ctgagctctggagacgacccgc

SEQ ID NO: 54057 - DNA, 22 bp, Artificial Sequence
  chemically synthesized
tgagctctggagacgacccgcg

SEQ ID NO: 54058 - DNA, 22 bp, Artificial Sequence
  chemically synthesized
agctctggagacgacccgcgag

SEQ ID NO: 54059 - DNA, 22 bp, Artificial Sequence
  chemically synthesized
tggagacgacccgcgagtggaa

SEQ ID NO: 54060 - DNA, 22 bp, Artificial Sequence
  chemically synthesized
gagacgacccgcgagtggaagg

SEQ ID NO: 54061 - DNA, 22 bp, Artificial Sequence
  chemically synthesized
atgggaagggacatgaagcaca

SEQ ID NO: 54062 - DNA, 22 bp, Artificial Sequence
  chemically synthesized
tcatcgcggctcgctcggtgcc

SEQ ID NO: 54063 - DNA, 20 bp, Artificial Sequence
  chemically synthesized
actaagtcaataatcagaat

SEQ ID NO: 54064 - DNA, 20 bp, Artificial Sequence
  chemically synthesized
aagtcaataatcagaatcag

SEQ ID NO: 54065 - DNA, 20 bp, Artificial Sequence
  chemically synthesized
agtcaataatcagaatcagc

SEQ ID NO: 54066 - DNA, 20 bp, Artificial Sequence
  chemically synthesized
aatcagaatcagcaggtttg

SEQ ID NO: 54067 - DNA, 20 bp, Artificial Sequence
  chemically synthesized
agaatcagcaggtttgcagt

SEQ ID NO: 54068 - DNA, 20 bp, Artificial Sequence
  chemically synthesized
cagcaggtttgcagtcagat

SEQ ID NO: 54069 - DNA, 20 bp, Artificial Sequence
  chemically synthesized
caggtttgcagtcagattgg

SEQ ID NO: 54070 - DNA, 20 bp, Artificial Sequence
  chemically synthesized
aggtttgcagtcagattggc

SEQ ID NO: 54071 - DNA, 20 bp, Artificial Sequence
  chemically synthesized
ggtttgcagtcagattggca

SEQ ID NO: 54072 - DNA, 20 bp, Artificial Sequence
  chemically synthesized
gcagtcagattggcagggat

SEQ ID NO: 54073 - DNA, 20 bp, Artificial Sequence
  chemically synthesized
gtcagattggcagggataag

SEQ ID NO: 54074 - DNA, 20 bp, Artificial Sequence
  chemically synthesized
attggcagggataagcagcc

SEQ ID NO: 54075 - DNA, 20 bp, Artificial Sequence
  chemically synthesized
cagggataagcagcctagct

SEQ ID NO: 54076 - DNA, 20 bp, Artificial Sequence
  chemically synthesized
agggataagcagcctagctc

SEQ ID NO: 54077 - DNA, 20 bp, Artificial Sequence
  chemically synthesized
ggataagcagcctagctcag

SEQ ID NO: 54078 - DNA, 20 bp, Artificial Sequence
  chemically synthesized
taagcagcctagctcaggag

SEQ ID NO: 54079 - DNA, 20 bp, Artificial Sequence
  chemically synthesized
cagcctagctcaggagaagt

SEQ ID NO: 54080 - DNA, 20 bp, Artificial Sequence
  chemically synthesized
ctcaggagaagtgagtataa

SEQ ID NO: 54081 - DNA, 20 bp, Artificial Sequence
  chemically synthesized
agaagtgagtataaaagccc

SEQ ID NO: 54082 - DNA, 20 bp, Artificial Sequence
  chemically synthesized
gaagtgagtataaaagcccc

SEQ ID NO: 54083 - DNA, 20 bp, Artificial Sequence
  chemically synthesized
tgagtataaaagccccaggc

SEQ ID NO: 54084 - DNA, 20 bp, Artificial Sequence
  chemically synthesized
gagtataaaagccccaggct

SEQ ID NO: 54085 - DNA, 20 bp, Artificial Sequence
  chemically synthesized
gtataaaagccccaggctgg

SEQ ID NO: 54086 - DNA, 20 bp, Artificial Sequence
  chemically synthesized
taaaagccccaggctgggag

SEQ ID NO: 54087 - DNA, 20 bp, Artificial Sequence
  chemically synthesized
caggctgggagcagccatca

SEQ ID NO: 54088 - DNA, 20 bp, Artificial Sequence
  chemically synthesized
gctgggagcagccatcacag

SEQ ID NO: 54089 - DNA, 20 bp, Artificial Sequence
  chemically synthesized
cacagaagtccactcattct

SEQ ID NO: 54090 - DNA, 20 bp, Artificial Sequence
  chemically synthesized
agaagtccactcattcttgg

SEQ ID NO: 54091 - DNA, 20 bp, Artificial Sequence
  chemically synthesized
gaagtccactcattcttggc

SEQ ID NO: 54092 - DNA, 20 bp, Artificial Sequence
  chemically synthesized
tccactcattcttggcagga

SEQ ID NO: 54093 - DNA, 20 bp, Artificial Sequence
  chemically synthesized
ctgctcctcctctgccttgc

SEQ ID NO: 54094 - DNA, 20 bp, Artificial Sequence
  chemically synthesized
cctcctctgccttgctggac

SEQ ID NO: 54095 - DNA, 20 bp, Artificial Sequence
  chemically synthesized
ctggactggtatttgtgtct

SEQ ID NO: 54096 - DNA, 20 bp, Artificial Sequence
  chemically synthesized
tggactggtatttgtgtctg

SEQ ID NO: 54097 - DNA, 20 bp, Artificial Sequence
  chemically synthesized
ctggtatttgtgtctgaggc

SEQ ID NO: 54098 - DNA, 20 bp, Artificial Sequence
  chemically synthesized
tgtgtctgaggctggcccta

SEQ ID NO: 54099 - DNA, 20 bp, Artificial Sequence
  chemically synthesized
tctgaggctggccctacggt

SEQ ID NO: 54100 - DNA, 20 bp, Artificial Sequence
  chemically synthesized
gacatcccattcctacattt

SEQ ID NO: 54101 - DNA, 20 bp, Artificial Sequence
  chemically synthesized
tttaagattcacgctaaatg

SEQ ID NO: 54102 - DNA, 20 bp, Artificial Sequence
  chemically synthesized
aagattcacgctaaatgaag

SEQ ID NO: 54103 - DNA, 20 bp, Artificial Sequence
  chemically synthesized
attcacgctaaatgaagtag

SEQ ID NO: 54104 - DNA, 20 bp, Artificial Sequence
  chemically synthesized
gaagtagaagtgactccttc

SEQ ID NO: 54105 - DNA, 20 bp, Artificial Sequence
  chemically synthesized
ctccttccagctttgccaac

SEQ ID NO: 54106 - DNA, 20 bp, Artificial Sequence
  chemically synthesized
tgccaaccagcttttattac

SEQ ID NO: 54107 - DNA, 20 bp, Artificial Sequence
  chemically synthesized
gccaaccagcttttattact

SEQ ID NO: 54108 - DNA, 20 bp, Artificial Sequence
  chemically synthesized
ccaaccagcttttattacta

SEQ ID NO: 54109 - DNA, 20 bp, Artificial Sequence
  chemically synthesized
ccagcttttattactagggc

SEQ ID NO: 54110 - DNA, 20 bp, Artificial Sequence
  chemically synthesized
cagcttttattactagggca

SEQ ID NO: 54111 - DNA, 20 bp, Artificial Sequence
  chemically synthesized
agcttttattactagggcaa

SEQ ID NO: 54112 - DNA, 20 bp, Artificial Sequence
  chemically synthesized
attactagggcaagggtacc

SEQ ID NO: 54113 - DNA, 20 bp, Artificial Sequence
  chemically synthesized
taattaattcaaacttcaaa

SEQ ID NO: 54114 - DNA, 20 bp, Artificial Sequence
  chemically synthesized
ttcaaacttcaaaaagaatg

SEQ ID NO: 54115 - DNA, 20 bp, Artificial Sequence
  chemically synthesized
aaaaagaatgaagttccact

SEQ ID NO: 54116 - DNA, 20 bp, Artificial Sequence
  chemically synthesized
gaagttccactgagcttact

SEQ ID NO: 54117 - DNA, 20 bp, Artificial Sequence
  chemically synthesized
ttccactgagcttactgagc

SEQ ID NO: 54118 - DNA, 20 bp, Artificial Sequence
  chemically synthesized
tccactgagcttactgagct

SEQ ID NO: 54119 - DNA, 20 bp, Artificial Sequence
  chemically synthesized
tgagctgggacttgaactct

SEQ ID NO: 54120 - DNA, 20 bp, Artificial Sequence
  chemically synthesized
agcattctacctcattgctt

SEQ ID NO: 54121 - DNA, 20 bp, Artificial Sequence
  chemically synthesized
acctcattgctttggtgcat

SEQ ID NO: 54122 - DNA, 20 bp, Artificial Sequence
  chemically synthesized
cctcattgctttggtgcatt

SEQ ID NO: 54123 - DNA, 20 bp, Artificial Sequence
  chemically synthesized
tgcattaggtttgtaatatc

SEQ ID NO: 54124 - DNA, 20 bp, Artificial Sequence
  chemically synthesized
atctggtacctctgtttcct

SEQ ID NO: 54125 - DNA, 20 bp, Artificial Sequence
  chemically synthesized
ggtacctctgtttcctcaga

SEQ ID NO: 54126 - DNA, 20 bp, Artificial Sequence
  chemically synthesized
ctgtttcctcagatagatga

SEQ ID NO: 54127 - DNA, 20 bp, Artificial Sequence
  chemically synthesized
tcagatagatgatagaaata

SEQ ID NO: 54128 - DNA, 20 bp, Artificial Sequence
  chemically synthesized
agaaataaagatatgatatt

SEQ ID NO: 54129 - DNA, 20 bp, Artificial Sequence
  chemically synthesized
gaaataaagatatgatatta

SEQ ID NO: 54130 - DNA, 20 bp, Artificial Sequence
  chemically synthesized
ataaagatatgatattaagg

SEQ ID NO: 54131 - DNA, 20 bp, Artificial Sequence
  chemically synthesized
agctgttaatactgaatttt

SEQ ID NO: 54132 - DNA, 20 bp, Artificial Sequence
  chemically synthesized
ttaatactgaattttcagaa

SEQ ID NO: 54133 - DNA, 20 bp, Artificial Sequence
  chemically synthesized
atccctccataaaatgtatt

SEQ ID NO: 54134 - DNA, 20 bp, Artificial Sequence
  chemically synthesized
tccctccataaaatgtattt

SEQ ID NO: 54135 - DNA, 20 bp, Artificial Sequence
  chemically synthesized
ccctccataaaatgtatttg

SEQ ID NO: 54136 - DNA, 20 bp, Artificial Sequence
  chemically synthesized
cctccataaaatgtatttgg

SEQ ID NO: 54137 - DNA, 20 bp, Artificial Sequence
  chemically synthesized
tgtatttgggggacaaactg

SEQ ID NO: 54138 - DNA, 20 bp, Artificial Sequence
  chemically synthesized
gtatttgggggacaaactgc

SEQ ID NO: 54139 - DNA, 20 bp, Artificial Sequence
  chemically synthesized
atttgggggacaaactgcag

SEQ ID NO: 54140 - DNA, 20 bp, Artificial Sequence
  chemically synthesized
aactgcaggagattatattc

SEQ ID NO: 54141 - DNA, 20 bp, Artificial Sequence
  chemically synthesized
gagattatattctggcccta

SEQ ID NO: 54142 - DNA, 20 bp, Artificial Sequence
  chemically synthesized
atttattgattaatctttaa

SEQ ID NO: 54143 - DNA, 20 bp, Artificial Sequence
  chemically synthesized
tttattgattaatctttaaa

SEQ ID NO: 54144 - DNA, 20 bp, Artificial Sequence
  chemically synthesized
tgattaatctttaaaaggct

SEQ ID NO: 54145 - DNA, 20 bp, Artificial Sequence
  chemically synthesized
aggcttagtgaacaatattc

SEQ ID NO: 54146 - DNA, 20 bp, Artificial Sequence
  chemically synthesized
ttagtgaacaatattctagt

SEQ ID NO: 54147 - DNA, 20 bp, Artificial Sequence
  chemically synthesized
tatctaattcttaaatcctc

SEQ ID NO: 54148 - DNA, 20 bp, Artificial Sequence
  chemically synthesized
ctaattcttaaatcctctag

SEQ ID NO: 54149 - DNA, 20 bp, Artificial Sequence
  chemically synthesized
aattaactaatactataaaa

SEQ ID NO: 54150 - DNA, 20 bp, Artificial Sequence
  chemically synthesized
attaactaatactataaaat

SEQ ID NO: 54151 - DNA, 20 bp, Artificial Sequence
  chemically synthesized
ctaatactataaaatgggtc

SEQ ID NO: 54152 - DNA, 20 bp, Artificial Sequence
  chemically synthesized
ctataaaatgggtctggatg

SEQ ID NO: 54153 - DNA, 20 bp, Artificial Sequence
  chemically synthesized
tgacattattttataacaac

SEQ ID NO: 54154 - DNA, 20 bp, Artificial Sequence
  chemically synthesized
attattttataacaactggt

SEQ ID NO: 54155 - DNA, 20 bp, Artificial Sequence
  chemically synthesized
tattttataacaactggtaa

SEQ ID NO: 54156 - DNA, 20 bp, Artificial Sequence
  chemically synthesized
attttataacaactggtaag

SEQ ID NO: 54157 - DNA, 20 bp, Artificial Sequence
  chemically synthesized
ttttataacaactggtaaga

SEQ ID NO: 54158 - DNA, 20 bp, Artificial Sequence
  chemically synthesized
ttataacaactggtaagagg

SEQ ID NO: 54159 - DNA, 20 bp, Artificial Sequence
  chemically synthesized
ctggtaagagggagtgacta

SEQ ID NO: 54160 - DNA, 20 bp, Artificial Sequence
  chemically synthesized
agcaacaactaaaatgatct

SEQ ID NO: 54161 - DNA, 20 bp, Artificial Sequence
  chemically synthesized
gcaacaactaaaatgatctc

SEQ ID NO: 54162 - DNA, 20 bp, Artificial Sequence
  chemically synthesized
tgatctcaggaaaacctgtt

SEQ ID NO: 54163 - DNA, 20 bp, Artificial Sequence
  chemically synthesized
aacctgtttggccctatgta

SEQ ID NO: 54164 - DNA, 20 bp, Artificial Sequence
  chemically synthesized
tatggtacattacatctttt

SEQ ID NO: 54165 - DNA, 20 bp, Artificial Sequence
  chemically synthesized
tttcagtaattccactcaaa

SEQ ID NO: 54166 - DNA, 20 bp, Artificial Sequence
  chemically synthesized
tcagtaattccactcaaatg

SEQ ID NO: 54167 - DNA, 20 bp, Artificial Sequence
  chemically synthesized
tcaaatggagacttttaaca

SEQ ID NO: 54168 - DNA, 20 bp, Artificial Sequence
  chemically synthesized
tttaacaaagcaactgttct

SEQ ID NO: 54169 - DNA, 20 bp, Artificial Sequence
  chemically synthesized
ttaacaaagcaactgttctc

SEQ ID NO: 54170 - DNA, 20 bp, Artificial Sequence
  chemically synthesized
taacaaagcaactgttctca

SEQ ID NO: 54171 - DNA, 20 bp, Artificial Sequence
  chemically synthesized
aacaaagcaactgttctcag

SEQ ID NO: 54172 - DNA, 20 bp, Artificial Sequence
  chemically synthesized
aaattcattatacacatccc

SEQ ID NO: 54173 - DNA, 20 bp, Artificial Sequence
  chemically synthesized
ttatacacatccctggttga

SEQ ID NO: 54174 - DNA, 20 bp, Artificial Sequence
  chemically synthesized
tacacatccctggttgatag

SEQ ID NO: 54175 - DNA, 20 bp, Artificial Sequence
  chemically synthesized
ctggttgatagcagtgtgtc

SEQ ID NO: 54176 - DNA, 20 bp, Artificial Sequence
  chemically synthesized
ggttgatagcagtgtgtctg

SEQ ID NO: 54177 - DNA, 20 bp, Artificial Sequence
  chemically synthesized
gttgatagcagtgtgtctgg

SEQ ID NO: 54178 - DNA, 20 bp, Artificial Sequence
  chemically synthesized
gatagcagtgtgtctggagg

SEQ ID NO: 54179 - DNA, 20 bp, Artificial Sequence
  chemically synthesized
ggcagaaaccattcttgctt

SEQ ID NO: 54180 - DNA, 20 bp, Artificial Sequence
  chemically synthesized
aattacgtctgtgttatact

SEQ ID NO: 54181 - DNA, 20 bp, Artificial Sequence
  chemically synthesized
tacgtctgtgttatactgag

SEQ ID NO: 54182 - DNA, 20 bp, Artificial Sequence
  chemically synthesized
acgtctgtgttatactgagt

SEQ ID NO: 54183 - DNA, 20 bp, Artificial Sequence
  chemically synthesized
cgtctgtgttatactgagta

SEQ ID NO: 54184 - DNA, 20 bp, Artificial Sequence
  chemically synthesized
ctgtgttatactgagtaggg

SEQ ID NO: 54185 - DNA, 20 bp, Artificial Sequence
  chemically synthesized
gacacttacgttcctgataa

SEQ ID NO: 54186 - DNA, 20 bp, Artificial Sequence
  chemically synthesized
acacttacgttcctgataat

SEQ ID NO: 54187 - DNA, 20 bp, Artificial Sequence
  chemically synthesized
tacgttcctgataatgggat

SEQ ID NO: 54188 - DNA, 20 bp, Artificial Sequence
  chemically synthesized
gtgtaattcttgtttcgctc

SEQ ID NO: 54189 - DNA, 20 bp, Artificial Sequence
  chemically synthesized
tccagatttctaataccaca

SEQ ID NO: 54190 - DNA, 20 bp, Artificial Sequence
  chemically synthesized
tcacgtgtcttctctacacc

SEQ ID NO: 54191 - DNA, 20 bp, Artificial Sequence
  chemically synthesized
cacgtgtcttctctacaccc

SEQ ID NO: 54192 - DNA, 20 bp, Artificial Sequence
  chemically synthesized
acgtgtcttctctacaccca

SEQ ID NO: 54193 - DNA, 20 bp, Artificial Sequence
  chemically synthesized
cttctctacacccagggcac

SEQ ID NO: 54194 - DNA, 20 bp, Artificial Sequence
  chemically synthesized
cccagggcaccggtgaatcc

SEQ ID NO: 54195 - DNA, 20 bp, Artificial Sequence
  chemically synthesized
tgaatccaagtgtcctctga

SEQ ID NO: 54196 - DNA, 20 bp, Artificial Sequence
  chemically synthesized
caagtgtcctctgatggtca

SEQ ID NO: 54197 - DNA, 20 bp, Artificial Sequence
  chemically synthesized
tcctctgatggtcaaagttc

SEQ ID NO: 54198 - DNA, 20 bp, Artificial Sequence
  chemically synthesized
caaagttctagatgctgtcc

SEQ ID NO: 54199 - DNA, 20 bp, Artificial Sequence
  chemically synthesized
aaagttctagatgctgtccg

SEQ ID NO: 54200 - DNA, 20 bp, Artificial Sequence
  chemically synthesized
gttctagatgctgtccgagg

SEQ ID NO: 54201 - DNA, 20 bp, Artificial Sequence
  chemically synthesized
aggcagtcctgccatcaatg

SEQ ID NO: 54202 - DNA, 20 bp, Artificial Sequence
  chemically synthesized
aatgtggccgtgcatgtgtt

SEQ ID NO: 54203 - DNA, 20 bp, Artificial Sequence
  chemically synthesized
tggccgtgcatgtgttcaga

SEQ ID NO: 54204 - DNA, 20 bp, Artificial Sequence
  chemically synthesized
ggccgtgcatgtgttcagaa

SEQ ID NO: 54205 - DNA, 20 bp, Artificial Sequence
  chemically synthesized
gaaaggctgctgatgacacc

SEQ ID NO: 54206 - DNA, 20 bp, Artificial Sequence
  chemically synthesized
aaaggctgctgatgacacct

SEQ ID NO: 54207 - DNA, 20 bp, Artificial Sequence
  chemically synthesized
aggctgctgatgacacctgg

SEQ ID NO: 54208 - DNA, 20 bp, Artificial Sequence
  chemically synthesized
acctgggagccatttgcctc

SEQ ID NO: 54209 - DNA, 20 bp, Artificial Sequence
  chemically synthesized
aaatggctcccaggtgtcat

SEQ ID NO: 54210 - DNA, 20 bp, Artificial Sequence
  chemically synthesized
tggctcccaggtgtcatcag

SEQ ID NO: 54211 - DNA, 20 bp, Artificial Sequence
  chemically synthesized
agcctttctgaacacatgca

SEQ ID NO: 54212 - DNA, 20 bp, Artificial Sequence
  chemically synthesized
cacatgcacggccacattga

SEQ ID NO: 54213 - DNA, 20 bp, Artificial Sequence
  chemically synthesized
atgcacggccacattgatgg

SEQ ID NO: 54214 - DNA, 20 bp, Artificial Sequence
  chemically synthesized
tgcacggccacattgatggc

SEQ ID NO: 54215 - DNA, 20 bp, Artificial Sequence
  chemically synthesized
cattgatggcaggactgcct

SEQ ID NO: 54216 - DNA, 20 bp, Artificial Sequence
  chemically synthesized
gatggcaggactgcctcgga

SEQ ID NO: 54217 - DNA, 20 bp, Artificial Sequence
  chemically synthesized
ggactgcctcggacagcatc

SEQ ID NO: 54218 - DNA, 20 bp, Artificial Sequence
  chemically synthesized
gcatctagaactttgaccat

SEQ ID NO: 54219 - DNA, 20 bp, Artificial Sequence
  chemically synthesized
atctagaactttgaccatca

SEQ ID NO: 54220 - DNA, 20 bp, Artificial Sequence
  chemically synthesized
tctagaactttgaccatcag

SEQ ID NO: 54221 - DNA, 20 bp, Artificial Sequence
  chemically synthesized
tttgaccatcagaggacact

SEQ ID NO: 54222 - DNA, 20 bp, Artificial Sequence
  chemically synthesized
cagaggacacttggattcac

SEQ ID NO: 54223 - DNA, 20 bp, Artificial Sequence
  chemically synthesized
acttggattcaccggtgccc

SEQ ID NO: 54224 - DNA, 20 bp, Artificial Sequence
  chemically synthesized
cttggattcaccggtgccct

SEQ ID NO: 54225 - DNA, 20 bp, Artificial Sequence
  chemically synthesized
attcaccggtgccctgggtg

SEQ ID NO: 54226 - DNA, 20 bp, Artificial Sequence
  chemically synthesized
tcaccggtgccctgggtgta

SEQ ID NO: 54227 - DNA, 20 bp, Artificial Sequence
  chemically synthesized
ccggtgccctgggtgtagag

SEQ ID NO: 54228 - DNA, 20 bp, Artificial Sequence
  chemically synthesized
tgggtgtagagaagacacgt

SEQ ID NO: 54229 - DNA, 20 bp, Artificial Sequence
  chemically synthesized
gtgtagagaagacacgtgag

SEQ ID NO: 54230 - DNA, 20 bp, Artificial Sequence
  chemically synthesized
gagaagttaacaaaattgat

SEQ ID NO: 54231 - DNA, 20 bp, Artificial Sequence
  chemically synthesized
gaagttaacaaaattgatca

SEQ ID NO: 54232 - DNA, 20 bp, Artificial Sequence
  chemically synthesized
aacaaaattgatcagagtga

SEQ ID NO: 54233 - DNA, 20 bp, Artificial Sequence
  chemically synthesized
acaaaattgatcagagtgaa

SEQ ID NO: 54234 - DNA, 20 bp, Artificial Sequence
  chemically synthesized
gtgaaaggatttattctttg

SEQ ID NO: 54235 - DNA, 20 bp, Artificial Sequence
  chemically synthesized
ggatttattctttgtggtat

SEQ ID NO: 54236 - DNA, 20 bp, Artificial Sequence
  chemically synthesized
tctttgtggtattagaaatc

SEQ ID NO: 54237 - DNA, 20 bp, Artificial Sequence
  chemically synthesized
tttgtggtattagaaatctg

SEQ ID NO: 54238 - DNA, 20 bp, Artificial Sequence
  chemically synthesized
ttagaaatctggagcgaaac

SEQ ID NO: 54239 - DNA, 20 bp, Artificial Sequence
  chemically synthesized
ttacacactgatcccattat

SEQ ID NO: 54240 - DNA, 20 bp, Artificial Sequence
  chemically synthesized
tacacactgatcccattatc

SEQ ID NO: 54241 - DNA, 20 bp, Artificial Sequence
  chemically synthesized
gatcccattatcaggaacgt

SEQ ID NO: 54242 - DNA, 20 bp, Artificial Sequence
  chemically synthesized
cgtaagtgtcgacaattaat

SEQ ID NO: 54243 - DNA, 20 bp, Artificial Sequence
  chemically synthesized
aattaatgagcttccctact

SEQ ID NO: 54244 - DNA, 20 bp, Artificial Sequence
  chemically synthesized
cttccctactcagtataaca

SEQ ID NO: 54245 - DNA, 20 bp, Artificial Sequence
  chemically synthesized
cacagacgtaattgtttcca

SEQ ID NO: 54246 - DNA, 20 bp, Artificial Sequence
  chemically synthesized
gacgtaattgtttccaaagc

SEQ ID NO: 54247 - DNA, 20 bp, Artificial Sequence
  chemically synthesized
aattgtttccaaagcaagaa

SEQ ID NO: 54248 - DNA, 20 bp, Artificial Sequence
  chemically synthesized
gcaagaatggtttctgcctc

SEQ ID NO: 54249 - DNA, 20 bp, Artificial Sequence
  chemically synthesized
ccagacacactgctatcaac

SEQ ID NO: 54250 - DNA, 20 bp, Artificial Sequence
  chemically synthesized
cagacacactgctatcaacc

SEQ ID NO: 54251 - DNA, 20 bp, Artificial Sequence
  chemically synthesized
agacacactgctatcaacca

SEQ ID NO: 54252 - DNA, 20 bp, Artificial Sequence
  chemically synthesized
ggatgtgtataatgaatttt

SEQ ID NO: 54253 - DNA, 20 bp, Artificial Sequence
  chemically synthesized
gatgtgtataatgaatttta

SEQ ID NO: 54254 - DNA, 20 bp, Artificial Sequence
  chemically synthesized
atgtgtataatgaattttaa

SEQ ID NO: 54255 - DNA, 20 bp, Artificial Sequence
  chemically synthesized
gtgtataatgaattttaagg

SEQ ID NO: 54256 - DNA, 20 bp, Artificial Sequence
  chemically synthesized
atgaattttaagggagaaaa

SEQ ID NO: 54257 - DNA, 20 bp, Artificial Sequence
  chemically synthesized
tgaattttaagggagaaaat

SEQ ID NO: 54258 - DNA, 20 bp, Artificial Sequence
  chemically synthesized
agggagaaaataggtcccct

SEQ ID NO: 54259 - DNA, 20 bp, Artificial Sequence
  chemically synthesized
gaaaataggtcccctgagaa

SEQ ID NO: 54260 - DNA, 20 bp, Artificial Sequence
  chemically synthesized
gagaacagttgctttgttaa

SEQ ID NO: 54261 - DNA, 20 bp, Artificial Sequence
  chemically synthesized
tttgttaaaagtctccattt

SEQ ID NO: 54262 - DNA, 20 bp, Artificial Sequence
  chemically synthesized
gttaaaagtctccatttgag

SEQ ID NO: 54263 - DNA, 20 bp, Artificial Sequence
  chemically synthesized
atttgagtggaattactgaa

SEQ ID NO: 54264 - DNA, 20 bp, Artificial Sequence
  chemically synthesized
aagatgtaatgtaccataca

SEQ ID NO: 54265 - DNA, 20 bp, Artificial Sequence
  chemically synthesized
agatgtaatgtaccatacat

SEQ ID NO: 54266 - DNA, 20 bp, Artificial Sequence
  chemically synthesized
gatgtaatgtaccatacata

SEQ ID NO: 54267 - DNA, 20 bp, Artificial Sequence
  chemically synthesized
gtaccatacatagggccaaa

SEQ ID NO: 54268 - DNA, 20 bp, Artificial Sequence
  chemically synthesized
taccatacatagggccaaac

SEQ ID NO: 54269 - DNA, 20 bp, Artificial Sequence
  chemically synthesized
agggccaaacaggttttcct

SEQ ID NO: 54270 - DNA, 20 bp, Artificial Sequence
  chemically synthesized
aggttttcctgagatcattt

SEQ ID NO: 54271 - DNA, 20 bp, Artificial Sequence
  chemically synthesized
gatcattttagttgttgcta

SEQ ID NO: 54272 - DNA, 20 bp, Artificial Sequence
  chemically synthesized
ctatagtcactccctcttac

SEQ ID NO: 54273 - DNA, 20 bp, Artificial Sequence
  chemically synthesized
cagttgttataaaataatgt

SEQ ID NO: 54274 - DNA, 20 bp, Artificial Sequence
  chemically synthesized
aataatgtcagaactacatc

SEQ ID NO: 54275 - DNA, 20 bp, Artificial Sequence
  chemically synthesized
ctacatccagacccatttta

SEQ ID NO: 54276 - DNA, 20 bp, Artificial Sequence
  chemically synthesized
ccagacccattttatagtat

SEQ ID NO: 54277 - DNA, 20 bp, Artificial Sequence
  chemically synthesized
atagtattagttaattcttc

SEQ ID NO: 54278 - DNA, 20 bp, Artificial Sequence
  chemically synthesized
agtattagttaattcttcta

SEQ ID NO: 54279 - DNA, 20 bp, Artificial Sequence
  chemically synthesized
gtattagttaattcttctag

SEQ ID NO: 54280 - DNA, 20 bp, Artificial Sequence
  chemically synthesized
ttaattcttctagaggattt

SEQ ID NO: 54281 - DNA, 20 bp, Artificial Sequence
  chemically synthesized
cttctagaggatttaagaat

SEQ ID NO: 54282 - DNA, 20 bp, Artificial Sequence
  chemically synthesized
ttaagaattagatatctgac

SEQ ID NO: 54283 - DNA, 20 bp, Artificial Sequence
  chemically synthesized
tgactagaatattgttcact

SEQ ID NO: 54284 - DNA, 20 bp, Artificial Sequence
  chemically synthesized
attgttcactaagcctttta

SEQ ID NO: 54285 - DNA, 20 bp, Artificial Sequence
  chemically synthesized
aaatacgttttgaataacta

SEQ ID NO: 54286 - DNA, 20 bp, Artificial Sequence
  chemically synthesized
aatacgttttgaataactat

SEQ ID NO: 54287 - DNA, 20 bp, Artificial Sequence
  chemically synthesized
atacgttttgaataactata

SEQ ID NO: 54288 - DNA, 20 bp, Artificial Sequence
  chemically synthesized
gttttgaataactatagggc

SEQ ID NO: 54289 - DNA, 20 bp, Artificial Sequence
  chemically synthesized
ggccagaatataatctcctg

SEQ ID NO: 54290 - DNA, 20 bp, Artificial Sequence
  chemically synthesized
tgtcccccaaatacatttta

SEQ ID NO: 54291 - DNA, 20 bp, Artificial Sequence
  chemically synthesized
tcccccaaatacattttatg

SEQ ID NO: 54292 - DNA, 20 bp, Artificial Sequence
  chemically synthesized
cccccaaatacattttatgg

SEQ ID NO: 54293 - DNA, 20 bp, Artificial Sequence
  chemically synthesized
ccccaaatacattttatgga

SEQ ID NO: 54294 - DNA, 20 bp, Artificial Sequence
  chemically synthesized
gggatacttttctgaaaatt

SEQ ID NO: 54295 - DNA, 20 bp, Artificial Sequence
  chemically synthesized
ttctgaaaattcagtattaa

SEQ ID NO: 54296 - DNA, 20 bp, Artificial Sequence
  chemically synthesized
tttatttctatcatctatct

SEQ ID NO: 54297 - DNA, 20 bp, Artificial Sequence
  chemically synthesized
ttatttctatcatctatctg

SEQ ID NO: 54298 - DNA, 20 bp, Artificial Sequence
  chemically synthesized
ctatcatctatctgaggaaa

SEQ ID NO: 54299 - DNA, 20 bp, Artificial Sequence
  chemically synthesized
atcatctatctgaggaaaca

SEQ ID NO: 54300 - DNA, 20 bp, Artificial Sequence
  chemically synthesized
tcatctatctgaggaaacag

SEQ ID NO: 54301 - DNA, 20 bp, Artificial Sequence
  chemically synthesized
atctgaggaaacagaggtac

SEQ ID NO: 54302 - DNA, 20 bp, Artificial Sequence
  chemically synthesized
attacaaacctaatgcacca

SEQ ID NO: 54303 - DNA, 20 bp, Artificial Sequence
  chemically synthesized
acctaatgcaccaaagcaat

SEQ ID NO: 54304 - DNA, 20 bp, Artificial Sequence
  chemically synthesized
cctaatgcaccaaagcaatg

SEQ ID NO: 54305 - DNA, 20 bp, Artificial Sequence
  chemically synthesized
aatgcaccaaagcaatgagg

SEQ ID NO: 54306 - DNA, 20 bp, Artificial Sequence
  chemically synthesized
aagcaatgaggtagaatgct

SEQ ID NO: 54307 - DNA, 20 bp, Artificial Sequence
  chemically synthesized
gcaatgaggtagaatgctca

SEQ ID NO: 54308 - DNA, 20 bp, Artificial Sequence
  chemically synthesized
aggtagaatgctcagagttc

SEQ ID NO: 54309 - DNA, 20 bp, Artificial Sequence
  chemically synthesized
aatgctcagagttcaagtcc

SEQ ID NO: 54310 - DNA, 20 bp, Artificial Sequence
  chemically synthesized
tcagagttcaagtcccagct

SEQ ID NO: 54311 - DNA, 20 bp, Artificial Sequence
  chemically synthesized
agttcaagtcccagctcagt

SEQ ID NO: 54312 - DNA, 20 bp, Artificial Sequence
  chemically synthesized
aagtcccagctcagtaagct

SEQ ID NO: 54313 - DNA, 20 bp, Artificial Sequence
  chemically synthesized
tcccagctcagtaagctcag

SEQ ID NO: 54314 - DNA, 20 bp, Artificial Sequence
  chemically synthesized
gtggaacttcattctttttg

SEQ ID NO: 54315 - DNA, 20 bp, Artificial Sequence
  chemically synthesized
tgaattaattatattaaaaa

SEQ ID NO: 54316 - DNA, 20 bp, Artificial Sequence
  chemically synthesized
attatattaaaaatagatgc

SEQ ID NO: 54317 - DNA, 20 bp, Artificial Sequence
  chemically synthesized
ttatattaaaaatagatgct

SEQ ID NO: 54318 - DNA, 20 bp, Artificial Sequence
  chemically synthesized
gatgctgggtacccttgccc

SEQ ID NO: 54319 - DNA, 20 bp, Artificial Sequence
  chemically synthesized
tacccttgccctagtaataa

SEQ ID NO: 54320 - DNA, 20 bp, Artificial Sequence
  chemically synthesized
cttgccctagtaataaaagc

SEQ ID NO: 54321 - DNA, 20 bp, Artificial Sequence
  chemically synthesized
ccctagtaataaaagctggt

SEQ ID NO: 54322 - DNA, 20 bp, Artificial Sequence
  chemically synthesized
gtaataaaagctggttggca

SEQ ID NO: 54323 - DNA, 20 bp, Artificial Sequence
  chemically synthesized
taaaagctggttggcaaagc

SEQ ID NO: 54324 - DNA, 20 bp, Artificial Sequence
  chemically synthesized
aagctggttggcaaagctgg

SEQ ID NO: 54325 - DNA, 20 bp, Artificial Sequence
  chemically synthesized
agctggttggcaaagctgga

SEQ ID NO: 54326 - DNA, 20 bp, Artificial Sequence
  chemically synthesized
ctggttggcaaagctggaag

SEQ ID NO: 54327 - DNA, 20 bp, Artificial Sequence
  chemically synthesized
ggagtcacttctacttcatt

SEQ ID NO: 54328 - DNA, 20 bp, Artificial Sequence
  chemically synthesized
tttagcgtgaatcttaaatg

SEQ ID NO: 54329 - DNA, 20 bp, Artificial Sequence
  chemically synthesized
ttagcgtgaatcttaaatgt

SEQ ID NO: 54330 - DNA, 20 bp, Artificial Sequence
  chemically synthesized
gtgaatcttaaatgtaggaa

SEQ ID NO: 54331 - DNA, 20 bp, Artificial Sequence
  chemically synthesized
tgaatcttaaatgtaggaat

SEQ ID NO: 54332 - DNA, 20 bp, Artificial Sequence
  chemically synthesized
aatgtaggaatgggatgtca

SEQ ID NO: 54333 - DNA, 20 bp, Artificial Sequence
  chemically synthesized
tgtcacagaaacactcaccg

SEQ ID NO: 54334 - DNA, 20 bp, Artificial Sequence
  chemically synthesized
gtcacagaaacactcaccgt

SEQ ID NO: 54335 - DNA, 20 bp, Artificial Sequence
  chemically synthesized
tcacagaaacactcaccgta

SEQ ID NO: 54336 - DNA, 20 bp, Artificial Sequence
  chemically synthesized
agaaacactcaccgtagggc

SEQ ID NO: 54337 - DNA, 20 bp, Artificial Sequence
  chemically synthesized
actcaccgtagggccagcct

SEQ ID NO: 54338 - DNA, 20 bp, Artificial Sequence
  chemically synthesized
ccagcctcagacacaaatac

SEQ ID NO: 54339 - DNA, 20 bp, Artificial Sequence
  chemically synthesized
ctcagacacaaataccagtc

SEQ ID NO: 54340 - DNA, 20 bp, Artificial Sequence
  chemically synthesized
gacacaaataccagtccagc

SEQ ID NO: 54341 - DNA, 20 bp, Artificial Sequence
  chemically synthesized
acacaaataccagtccagca

SEQ ID NO: 54342 - DNA, 20 bp, Artificial Sequence
  chemically synthesized
caaataccagtccagcaagg

SEQ ID NO: 54343 - DNA, 20 bp, Artificial Sequence
  chemically synthesized
aataccagtccagcaaggca

SEQ ID NO: 54344 - DNA, 20 bp, Artificial Sequence
  chemically synthesized
ataccagtccagcaaggcag

SEQ ID NO: 54345 - DNA, 20 bp, Artificial Sequence
  chemically synthesized
accagtccagcaaggcagag

SEQ ID NO: 54346 - DNA, 20 bp, Artificial Sequence
  chemically synthesized
ccagtccagcaaggcagagg

SEQ ID NO: 54347 - DNA, 20 bp, Artificial Sequence
  chemically synthesized
agtccagcaaggcagaggag

SEQ ID NO: 54348 - DNA, 20 bp, Artificial Sequence
  chemically synthesized
ccagcaaggcagaggaggag

SEQ ID NO: 54349 - DNA, 20 bp, Artificial Sequence
  chemically synthesized
gcagaggaggagcagacgat

SEQ ID NO: 54350 - DNA, 20 bp, Artificial Sequence
  chemically synthesized
gaggaggagcagacgatgag

SEQ ID NO: 54351 - DNA, 20 bp, Artificial Sequence
  chemically synthesized
cgatgagaagccatcctgcc

SEQ ID NO: 54352 - DNA, 20 bp, Artificial Sequence
  chemically synthesized
gaagccatcctgccaagaat

SEQ ID NO: 54353 - DNA, 20 bp, Artificial Sequence
  chemically synthesized
gccatcctgccaagaatgag

SEQ ID NO: 54354 - DNA, 20 bp, Artificial Sequence
  chemically synthesized
gaatgagtggacttctgtga

SEQ ID NO: 54355 - DNA, 20 bp, Artificial Sequence
  chemically synthesized
acttctgtgatggctgctcc

SEQ ID NO: 54356 - DNA, 20 bp, Artificial Sequence
  chemically synthesized
tgtgatggctgctcccagcc

SEQ ID NO: 54357 - DNA, 20 bp, Artificial Sequence
  chemically synthesized
gtgatggctgctcccagcct

SEQ ID NO: 54358 - DNA, 20 bp, Artificial Sequence
  chemically synthesized
tgatggctgctcccagcctg

SEQ ID NO: 54359 - DNA, 20 bp, Artificial Sequence
  chemically synthesized
cttttatactcacttctcct

SEQ ID NO: 54360 - DNA, 20 bp, Artificial Sequence
  chemically synthesized
tatactcacttctcctgagc

SEQ ID NO: 54361 - DNA, 20 bp, Artificial Sequence
  chemically synthesized
atactcacttctcctgagct

SEQ ID NO: 54362 - DNA, 20 bp, Artificial Sequence
  chemically synthesized
gctgattctgattattgact

SEQ ID NO: 54363 - DNA, 20 bp, Artificial Sequence
  chemically synthesized
aggtttgcagtcagattggc

SEQ ID NO: 54364 - DNA, 20 bp, Artificial Sequence
  chemically synthesized
agcagcctagctcaggagaa

SEQ ID NO: 54365 - DNA, 20 bp, Artificial Sequence
  chemically synthesized
agaagtccactcattcttgg

SEQ ID NO: 54366 - DNA, 20 bp, Artificial Sequence
  chemically synthesized
tgtctgaggctggccctacg

SEQ ID NO: 54367 - DNA, 20 bp, Artificial Sequence
  chemically synthesized
ccagcttttattactagggc

SEQ ID NO: 54368 - DNA, 20 bp, Artificial Sequence
  chemically synthesized
taattaattcaaacttcaaa

SEQ ID NO: 54369 - DNA, 20 bp, Artificial Sequence
  chemically synthesized
tattaaggaagctgttaata

SEQ ID NO: 54370 - DNA, 20 bp, Artificial Sequence
  chemically synthesized
ctaattcttaaatcctctag

SEQ ID NO: 54371 - DNA, 20 bp, Artificial Sequence
  chemically synthesized
gaattaactaatactataaa

SEQ ID NO: 54372 - DNA, 20 bp, Artificial Sequence
  chemically synthesized
actaatactataaaatgggt

SEQ ID NO: 54373 - DNA, 20 bp, Artificial Sequence
  chemically synthesized
ttttataacaactggtaaga

SEQ ID NO: 54374 - DNA, 20 bp, Artificial Sequence
  chemically synthesized
acaattacgtctgtgttata

SEQ ID NO: 54375 - DNA, 20 bp, Artificial Sequence
  chemically synthesized
gacacttacgttcctgataa

SEQ ID NO: 54376 - DNA, 20 bp, Artificial Sequence
  chemically synthesized
tccagatttctaataccaca

SEQ ID NO: 54377 - DNA, 20 bp, Artificial Sequence
  chemically synthesized
tctctacacccagggcaccg

SEQ ID NO: 54378 - DNA, 20 bp, Artificial Sequence
  chemically synthesized
ctttgaccatcagaggacac

SEQ ID NO: 54379 - DNA, 20 bp, Artificial Sequence
  chemically synthesized
cacttggattcaccggtgcc

SEQ ID NO: 54380 - DNA, 20 bp, Artificial Sequence
  chemically synthesized
gagaagttaacaaaattgat

SEQ ID NO: 54381 - DNA, 20 bp, Artificial Sequence
  chemically synthesized
aacaaaattgatcagagtga

SEQ ID NO: 54382 - DNA, 20 bp, Artificial Sequence
  chemically synthesized
ttagaaatctggagcgaaac

SEQ ID NO: 54383 - DNA, 20 bp, Artificial Sequence
  chemically synthesized
gacgtaattgtttccaaagc

SEQ ID NO: 54384 - DNA, 20 bp, Artificial Sequence
  chemically synthesized
cagacacactgctatcaacc

SEQ ID NO: 54385 - DNA, 20 bp, Artificial Sequence
  chemically synthesized
atcaaccagggatgtgtata

SEQ ID NO: 54386 - DNA, 20 bp, Artificial Sequence
  chemically synthesized
gctttgttaaaagtctccat

SEQ ID NO: 54387 - DNA, 20 bp, Artificial Sequence
  chemically synthesized
gttaaaagtctccatttgag

SEQ ID NO: 54388 - DNA, 20 bp, Artificial Sequence
  chemically synthesized
agtattagttaattcttcta

SEQ ID NO: 54389 - DNA, 20 bp, Artificial Sequence
  chemically synthesized
ttaattcttctagaggattt

SEQ ID NO: 54390 - DNA, 20 bp, Artificial Sequence
  chemically synthesized
ttaagaattagatatctgac

SEQ ID NO: 54391 - DNA, 20 bp, Artificial Sequence
  chemically synthesized
gattaatcaataaatacgtt

SEQ ID NO: 54392 - DNA, 20 bp, Artificial Sequence
  chemically synthesized
gttttgaataactatagggc

SEQ ID NO: 54393 - DNA, 20 bp, Artificial Sequence
  chemically synthesized
cccccaaatacattttatgg

SEQ ID NO: 54394 - DNA, 20 bp, Artificial Sequence
  chemically synthesized
aatgcaccaaagcaatgagg

SEQ ID NO: 54395 - DNA, 20 bp, Artificial Sequence
  chemically synthesized
aagcaatgaggtagaatgct

SEQ ID NO: 54396 - DNA, 20 bp, Artificial Sequence
  chemically synthesized
aacttcattctttttgaagt

SEQ ID NO: 54397 - DNA, 20 bp, Artificial Sequence
  chemically synthesized
aattatattaaaaatagatg

SEQ ID NO: 54398 - DNA, 20 bp, Artificial Sequence
  chemically synthesized
agctggttggcaaagctgga

SEQ ID NO: 54399 - DNA, 20 bp, Artificial Sequence
  chemically synthesized
tcacttctacttcatttagc

SEQ ID NO: 54400 - DNA, 20 bp, Artificial Sequence
  chemically synthesized
ttagcgtgaatcttaaatgt

SEQ ID NO: 54401 - DNA, 20 bp, Artificial Sequence
  chemically synthesized
gtgaatcttaaatgtaggaa

SEQ ID NO: 54402 - DNA, 20 bp, Artificial Sequence
  chemically synthesized
cgatgagaagccatcctgcc

SEQ ID NO: 54403 - DNA, 20 bp, Artificial Sequence
  chemically synthesized
gagaagccatcctgccaaga

SEQ ID NO: 54404 - DNA, 20 bp, Artificial Sequence
  chemically synthesized
ataattaattcaaacttcaa

SEQ ID NO: 54405 - DNA, 20 bp, Artificial Sequence
  chemically synthesized
tctgtttcctcagatagatg

SEQ ID NO: 54406 - DNA, 20 bp, Artificial Sequence
  chemically synthesized
aagctgttaatactgaattt

SEQ ID NO: 54407 - DNA, 20 bp, Artificial Sequence
  chemically synthesized
tctaattcttaaatcctcta

SEQ ID NO: 54408 - DNA, 20 bp, Artificial Sequence
  chemically synthesized
tgatagcagtgtgtctggag

SEQ ID NO: 54409 - DNA, 20 bp, Artificial Sequence
  chemically synthesized
ctccagatttctaataccac

SEQ ID NO: 54410 - DNA, 20 bp, Artificial Sequence
  chemically synthesized
caatgtggccgtgcatgtgt

SEQ ID NO: 54411 - DNA, 20 bp, Artificial Sequence
  chemically synthesized
aggatttattctttgtggta

SEQ ID NO: 54412 - DNA, 20 bp, Artificial Sequence
  chemically synthesized
attagaaatctggagcgaaa

SEQ ID NO: 54413 - DNA, 20 bp, Artificial Sequence
  chemically synthesized
agacgtaattgtttccaaag

SEQ ID NO: 54414 - DNA, 20 bp, Artificial Sequence
  chemically synthesized
tgtgtataatgaattttaag

SEQ ID NO: 54415 - DNA, 20 bp, Artificial Sequence
  chemically synthesized
gttaattcttctagaggatt

SEQ ID NO: 54416 - DNA, 20 bp, Artificial Sequence
  chemically synthesized
tttaagaattagatatctga

SEQ ID NO: 54417 - DNA, 20 bp, Artificial Sequence
  chemically synthesized
cgttttgaataactataggg

SEQ ID NO: 54418 - DNA, 20 bp, Artificial Sequence
  chemically synthesized
taatgcaccaaagcaatgag

SEQ ID NO: 54419 - DNA, 20 bp, Artificial Sequence
  chemically synthesized
aaatgtaggaatgggatgtc

SEQ ID NO: 54420 - DNA, 20 bp, Artificial Sequence
  chemically synthesized
acgatgagaagccatcctgc

SEQ ID NO: 54421 - DNA, 20 bp, Artificial Sequence
  chemically synthesized
attctggccctatagttatt

SEQ ID NO: 54422 - DNA, 20 bp, Artificial Sequence
  chemically synthesized
aacaactaaaatgatctcag

SEQ ID NO: 54423 - DNA, 20 bp, Artificial Sequence
  chemically synthesized
taagtcaataatcagaatca

SEQ ID NO: 54424 - DNA, 20 bp, Artificial Sequence
  chemically synthesized
tcagaatcagcaggtttgca

SEQ ID NO: 54425 - DNA, 20 bp, Artificial Sequence
  chemically synthesized
agtccactcattcttggcag

SEQ ID NO: 54426 - DNA, 20 bp, Artificial Sequence
  chemically synthesized
tctgaggctggccctacggt

SEQ ID NO: 54427 - DNA, 20 bp, Artificial Sequence
  chemically synthesized
gtgacatcccattcctacat

SEQ ID NO: 54428 - DNA, 20 bp, Artificial Sequence
  chemically synthesized
atgaagtagaagtgactcct

SEQ ID NO: 54429 - DNA, 20 bp, Artificial Sequence
  chemically synthesized
gactccttccagctttgcca

SEQ ID NO: 54430 - DNA, 20 bp, Artificial Sequence
  chemically synthesized
tcaaaaagaatgaagttcca

SEQ ID NO: 54431 - DNA, 20 bp, Artificial Sequence
  chemically synthesized
gaactctgagcattctacct

SEQ ID NO: 54432 - DNA, 20 bp, Artificial Sequence
  chemically synthesized
tacctcattgctttggtgca

SEQ ID NO: 54433 - DNA, 20 bp, Artificial Sequence
  chemically synthesized
aggtttgtaatatctggtac

SEQ ID NO: 54434 - DNA, 20 bp, Artificial Sequence
  chemically synthesized
gtatttgggggacaaactgc

SEQ ID NO: 54435 - DNA, 20 bp, Artificial Sequence
  chemically synthesized
atagttattcaaaacgtatt

SEQ ID NO: 54436 - DNA, 20 bp, Artificial Sequence
  chemically synthesized
tatttattgattaatcttta

SEQ ID NO: 54437 - DNA, 20 bp, Artificial Sequence
  chemically synthesized
actaaaatgatctcaggaaa

SEQ ID NO: 54438 - DNA, 20 bp, Artificial Sequence
  chemically synthesized
tgtctggaggcagaaaccat

SEQ ID NO: 54439 - DNA, 20 bp, Artificial Sequence
  chemically synthesized
taatgggatcagtgtgtaat

SEQ ID NO: 54440 - DNA, 20 bp, Artificial Sequence
  chemically synthesized
gtgtgtaattcttgtttcgc

SEQ ID NO: 54441 - DNA, 20 bp, Artificial Sequence
  chemically synthesized
actttgaccatcagaggaca

SEQ ID NO: 54442 - DNA, 20 bp, Artificial Sequence
  chemically synthesized
taacaaaattgatcagagtg

SEQ ID NO: 54443 - DNA, 20 bp, Artificial Sequence
  chemically synthesized
aacgtaagtgtcgacaatta

SEQ ID NO: 54444 - DNA, 20 bp, Artificial Sequence
  chemically synthesized
actcagtataacacagacgt

SEQ ID NO: 54445 - DNA, 20 bp, Artificial Sequence
  chemically synthesized
gtaattgtttccaaagcaag

SEQ ID NO: 54446 - DNA, 20 bp, Artificial Sequence
  chemically synthesized
aaaataggtcccctgagaac

SEQ ID NO: 54447 - DNA, 20 bp, Artificial Sequence
  chemically synthesized
tgtaccatacatagggccaa

SEQ ID NO: 54448 - DNA, 20 bp, Artificial Sequence
  chemically synthesized
tagtattagttaattcttct

SEQ ID NO: 54449 - DNA, 20 bp, Artificial Sequence
  chemically synthesized
atattgttcactaagccttt

SEQ ID NO: 54450 - DNA, 20 bp, Artificial Sequence
  chemically synthesized
ttttaaagattaatcaataa

SEQ ID NO: 54451 - DNA, 20 bp, Artificial Sequence
  chemically synthesized
agggccagaatataatctcc

SEQ ID NO: 54452 - DNA, 20 bp, Artificial Sequence
  chemically synthesized
ttttctgaaaattcagtatt

SEQ ID NO: 54453 - DNA, 20 bp, Artificial Sequence
  chemically synthesized
cagtggaacttcattctttt

SEQ ID NO: 54454 - DNA, 20 bp, Artificial Sequence
  chemically synthesized
tgtgatggctgctcccagcc

SEQ ID NO: 54455 - DNA, 20 bp, Artificial Sequence
  chemically synthesized
tactcacttctcctgagcta

SEQ ID NO: 54456 - DNA, 20 bp, Artificial Sequence
  chemically synthesized
tgccaatctgactgcaaacc

SEQ ID NO: 54457 - DNA, 20 bp, Artificial Sequence
  chemically synthesized
tctgactgcaaacctgctga

SEQ ID NO: 54458 - DNA, 22 bp, Artificial Sequence
  chemically synthesized
actaagtcaataatcagaatca

SEQ ID NO: 54459 - DNA, 22 bp, Artificial Sequence
  chemically synthesized
agtcaataatcagaatcagcag

SEQ ID NO: 54460 - DNA, 22 bp, Artificial Sequence
  chemically synthesized
gcagtcagattggcagggataa

SEQ ID NO: 54461 - DNA, 22 bp, Artificial Sequence
  chemically synthesized
cagtcagattggcagggataag

SEQ ID NO: 54462 - DNA, 22 bp, Artificial Sequence
  chemically synthesized
gcagggataagcagcctagctc

SEQ ID NO: 54463 - DNA, 22 bp, Artificial Sequence
  chemically synthesized
gctcaggagaagtgagtataaa

SEQ ID NO: 54464 - DNA, 22 bp, Artificial Sequence
  chemically synthesized
aggagaagtgagtataaaagcc

SEQ ID NO: 54465 - DNA, 22 bp, Artificial Sequence
  chemically synthesized
ggagcagccatcacagaagtcc

SEQ ID NO: 54466 - DNA, 22 bp, Artificial Sequence
  chemically synthesized
attcttggcaggatggcttctc

SEQ ID NO: 54467 - DNA, 22 bp, Artificial Sequence
  chemically synthesized
ttggcaggatggcttctcatcg

SEQ ID NO: 54468 - DNA, 22 bp, Artificial Sequence
  chemically synthesized
ggcaggatggcttctcatcgtc

SEQ ID NO: 54469 - DNA, 22 bp, Artificial Sequence
  chemically synthesized
gcaggatggcttctcatcgtct

SEQ ID NO: 54470 - DNA, 22 bp, Artificial Sequence
  chemically synthesized
ctcatcgtctgctcctcctctg

SEQ ID NO: 54471 - DNA, 22 bp, Artificial Sequence
  chemically synthesized
tcatcgtctgctcctcctctgc

SEQ ID NO: 54472 - DNA, 22 bp, Artificial Sequence
  chemically synthesized
atcgtctgctcctcctctgcct

SEQ ID NO: 54473 - DNA, 22 bp, Artificial Sequence
  chemically synthesized
ctcctcctctgccttgctggac

SEQ ID NO: 54474 - DNA, 22 bp, Artificial Sequence
  chemically synthesized
ctcctctgccttgctggactgg

SEQ ID NO: 54475 - DNA, 22 bp, Artificial Sequence
  chemically synthesized
ctctgccttgctggactggtat

SEQ ID NO: 54476 - DNA, 22 bp, Artificial Sequence
  chemically synthesized
tgccttgctggactggtatttg

SEQ ID NO: 54477 - DNA, 22 bp, Artificial Sequence
  chemically synthesized
ccttgctggactggtatttgtg

SEQ ID NO: 54478 - DNA, 22 bp, Artificial Sequence
  chemically synthesized
gctggactggtatttgtgtctg

SEQ ID NO: 54479 - DNA, 22 bp, Artificial Sequence
  chemically synthesized
ctggactggtatttgtgtctga

SEQ ID NO: 54480 - DNA, 22 bp, Artificial Sequence
  chemically synthesized
gactggtatttgtgtctgaggc

SEQ ID NO: 54481 - DNA, 22 bp, Artificial Sequence
  chemically synthesized
gtatttgtgtctgaggctggcc

SEQ ID NO: 54482 - DNA, 22 bp, Artificial Sequence
  chemically synthesized
gtgtctgaggctggccctacgg

SEQ ID NO: 54483 - DNA, 22 bp, Artificial Sequence
  chemically synthesized
tgtctgaggctggccctacggt

SEQ ID NO: 54484 - DNA, 22 bp, Artificial Sequence
  chemically synthesized
aggctggccctacggtgagtgt

SEQ ID NO: 54485 - DNA, 22 bp, Artificial Sequence
  chemically synthesized
gccctacggtgagtgtttctgt

SEQ ID NO: 54486 - DNA, 22 bp, Artificial Sequence
  chemically synthesized
cggtgagtgtttctgtgacatc

SEQ ID NO: 54487 - DNA, 22 bp, Artificial Sequence
  chemically synthesized
ctgtgacatcccattcctacat

SEQ ID NO: 54488 - DNA, 22 bp, Artificial Sequence
  chemically synthesized
tgtgacatcccattcctacatt

SEQ ID NO: 54489 - DNA, 22 bp, Artificial Sequence
  chemically synthesized
tgacatcccattcctacattta

SEQ ID NO: 54490 - DNA, 22 bp, Artificial Sequence
  chemically synthesized
ctacatttaagattcacgctaa

SEQ ID NO: 54491 - DNA, 22 bp, Artificial Sequence
  chemically synthesized
catttaagattcacgctaaatg

SEQ ID NO: 54492 - DNA, 22 bp, Artificial Sequence
  chemically synthesized
aagattcacgctaaatgaagta

SEQ ID NO: 54493 - DNA, 22 bp, Artificial Sequence
  chemically synthesized
agattcacgctaaatgaagtag

SEQ ID NO: 54494 - DNA, 22 bp, Artificial Sequence
  chemically synthesized
acgctaaatgaagtagaagtga

SEQ ID NO: 54495 - DNA, 22 bp, Artificial Sequence
  chemically synthesized
aatgaagtagaagtgactcctt

SEQ ID NO: 54496 - DNA, 22 bp, Artificial Sequence
  chemically synthesized
cttccagctttgccaaccagct

SEQ ID NO: 54497 - DNA, 22 bp, Artificial Sequence
  chemically synthesized
ccagctttgccaaccagctttt

SEQ ID NO: 54498 - DNA, 22 bp, Artificial Sequence
  chemically synthesized
cagctttgccaaccagctttta

SEQ ID NO: 54499 - DNA, 22 bp, Artificial Sequence
  chemically synthesized
tgccaaccagcttttattacta

SEQ ID NO: 54500 - DNA, 22 bp, Artificial Sequence
  chemically synthesized
gccaaccagcttttattactag

SEQ ID NO: 54501 - DNA, 22 bp, Artificial Sequence
  chemically synthesized
ccaaccagcttttattactagg

SEQ ID NO: 54502 - DNA, 22 bp, Artificial Sequence
  chemically synthesized
ttattactagggcaagggtacc

SEQ ID NO: 54503 - DNA, 22 bp, Artificial Sequence
  chemically synthesized
tattactagggcaagggtaccc

SEQ ID NO: 54504 - DNA, 22 bp, Artificial Sequence
  chemically synthesized
attactagggcaagggtaccca

SEQ ID NO: 54505 - DNA, 22 bp, Artificial Sequence
  chemically synthesized
ttactagggcaagggtacccag

SEQ ID NO: 54506 - DNA, 22 bp, Artificial Sequence
  chemically synthesized
ctagggcaagggtacccagcat

SEQ ID NO: 54507 - DNA, 22 bp, Artificial Sequence
  chemically synthesized
gggcaagggtacccagcatcta

SEQ ID NO: 54508 - DNA, 22 bp, Artificial Sequence
  chemically synthesized
tttttaatataattaattcaaa

SEQ ID NO: 54509 - DNA, 22 bp, Artificial Sequence
  chemically synthesized
ttaatataattaattcaaactt

SEQ ID NO: 54510 - DNA, 22 bp, Artificial Sequence
  chemically synthesized
taatataattaattcaaacttc

SEQ ID NO: 54511 - DNA, 22 bp, Artificial Sequence
  chemically synthesized
aatataattaattcaaacttca

SEQ ID NO: 54512 - DNA, 22 bp, Artificial Sequence
  chemically synthesized
atataattaattcaaacttcaa

SEQ ID NO: 54513 - DNA, 22 bp, Artificial Sequence
  chemically synthesized
attcaaacttcaaaaagaatga

SEQ ID NO: 54514 - DNA, 22 bp, Artificial Sequence
  chemically synthesized
aaacttcaaaaagaatgaagtt

SEQ ID NO: 54515 - DNA, 22 bp, Artificial Sequence
  chemically synthesized
caaaaagaatgaagttccactg

SEQ ID NO: 54516 - DNA, 22 bp, Artificial Sequence
  chemically synthesized
aaaaagaatgaagttccactga

SEQ ID NO: 54517 - DNA, 22 bp, Artificial Sequence
  chemically synthesized
cactgagcttactgagctggga

SEQ ID NO: 54518 - DNA, 22 bp, Artificial Sequence
  chemically synthesized
agcttactgagctgggacttga

SEQ ID NO: 54519 - DNA, 22 bp, Artificial Sequence
  chemically synthesized
actgagctgggacttgaactct

SEQ ID NO: 54520 - DNA, 22 bp, Artificial Sequence
  chemically synthesized
ctgagctgggacttgaactctg

SEQ ID NO: 54521 - DNA, 22 bp, Artificial Sequence
  chemically synthesized
agctgggacttgaactctgagc

SEQ ID NO: 54522 - DNA, 22 bp, Artificial Sequence
  chemically synthesized
ggacttgaactctgagcattct

SEQ ID NO: 54523 - DNA, 22 bp, Artificial Sequence
  chemically synthesized
gaactctgagcattctacctca

SEQ ID NO: 54524 - DNA, 22 bp, Artificial Sequence
  chemically synthesized
aactctgagcattctacctcat

SEQ ID NO: 54525 - DNA, 22 bp, Artificial Sequence
  chemically synthesized
tgagcattctacctcattgctt

SEQ ID NO: 54526 - DNA, 22 bp, Artificial Sequence
  chemically synthesized
agcattctacctcattgctttg

SEQ ID NO: 54527 - DNA, 22 bp, Artificial Sequence
  chemically synthesized
tacctcattgctttggtgcatt

SEQ ID NO: 54528 - DNA, 22 bp, Artificial Sequence
  chemically synthesized
cctcattgctttggtgcattag

SEQ ID NO: 54529 - DNA, 22 bp, Artificial Sequence
  chemically synthesized
attgctttggtgcattaggttt

SEQ ID NO: 54530 - DNA, 22 bp, Artificial Sequence
  chemically synthesized
ctttggtgcattaggtttgtaa

SEQ ID NO: 54531 - DNA, 22 bp, Artificial Sequence
  chemically synthesized
tggtgcattaggtttgtaatat

SEQ ID NO: 54532 - DNA, 22 bp, Artificial Sequence
  chemically synthesized
ggtgcattaggtttgtaatatc

SEQ ID NO: 54533 - DNA, 22 bp, Artificial Sequence
  chemically synthesized
gtgcattaggtttgtaatatct

SEQ ID NO: 54534 - DNA, 22 bp, Artificial Sequence
  chemically synthesized
ggtttgtaatatctggtacctc

SEQ ID NO: 54535 - DNA, 22 bp, Artificial Sequence
  chemically synthesized
gtaatatctggtacctctgttt

SEQ ID NO: 54536 - DNA, 22 bp, Artificial Sequence
  chemically synthesized
taatatctggtacctctgtttc

SEQ ID NO: 54537 - DNA, 22 bp, Artificial Sequence
  chemically synthesized
gtacctctgtttcctcagatag

SEQ ID NO: 54538 - DNA, 22 bp, Artificial Sequence
  chemically synthesized
tgtttcctcagatagatgatag

SEQ ID NO: 54539 - DNA, 22 bp, Artificial Sequence
  chemically synthesized
tttcctcagatagatgatagaa

SEQ ID NO: 54540 - DNA, 22 bp, Artificial Sequence
  chemically synthesized
cctcagatagatgatagaaata

SEQ ID NO: 54541 - DNA, 22 bp, Artificial Sequence
  chemically synthesized
ctcagatagatgatagaaataa

SEQ ID NO: 54542 - DNA, 22 bp, Artificial Sequence
  chemically synthesized
agatagatgatagaaataaaga

SEQ ID NO: 54543 - DNA, 22 bp, Artificial Sequence
  chemically synthesized
aggaagctgttaatactgaatt

SEQ ID NO: 54544 - DNA, 22 bp, Artificial Sequence
  chemically synthesized
ttaatactgaattttcagaaaa

SEQ ID NO: 54545 - DNA, 22 bp, Artificial Sequence
  chemically synthesized
atactgaattttcagaaaagta

SEQ ID NO: 54546 - DNA, 22 bp, Artificial Sequence
  chemically synthesized
aattttcagaaaagtatccctc

SEQ ID NO: 54547 - DNA, 22 bp, Artificial Sequence
  chemically synthesized
tcagaaaagtatccctccataa

SEQ ID NO: 54548 - DNA, 22 bp, Artificial Sequence
  chemically synthesized
cagaaaagtatccctccataaa

SEQ ID NO: 54549 - DNA, 22 bp, Artificial Sequence
  chemically synthesized
agaaaagtatccctccataaaa

SEQ ID NO: 54550 - DNA, 22 bp, Artificial Sequence
  chemically synthesized
cataaaatgtatttgggggaca

SEQ ID NO: 54551 - DNA, 22 bp, Artificial Sequence
  chemically synthesized
gggggacaaactgcaggagatt

SEQ ID NO: 54552 - DNA, 22 bp, Artificial Sequence
  chemically synthesized
ggggacaaactgcaggagatta

SEQ ID NO: 54553 - DNA, 22 bp, Artificial Sequence
  chemically synthesized
caggagattatattctggccct

SEQ ID NO: 54554 - DNA, 22 bp, Artificial Sequence
  chemically synthesized
tattctggccctatagttattc

SEQ ID NO: 54555 - DNA, 22 bp, Artificial Sequence
  chemically synthesized
tggccctatagttattcaaaac

SEQ ID NO: 54556 - DNA, 22 bp, Artificial Sequence
  chemically synthesized
gccctatagttattcaaaacgt

SEQ ID NO: 54557 - DNA, 22 bp, Artificial Sequence
  chemically synthesized
tagttattcaaaacgtatttat

SEQ ID NO: 54558 - DNA, 22 bp, Artificial Sequence
  chemically synthesized
ttcaaaacgtatttattgatta

SEQ ID NO: 54559 - DNA, 22 bp, Artificial Sequence
  chemically synthesized
aaaacgtatttattgattaatc

SEQ ID NO: 54560 - DNA, 22 bp, Artificial Sequence
  chemically synthesized
attgattaatctttaaaaggct

SEQ ID NO: 54561 - DNA, 22 bp, Artificial Sequence
  chemically synthesized
ttgattaatctttaaaaggctt

SEQ ID NO: 54562 - DNA, 22 bp, Artificial Sequence
  chemically synthesized
attaatctttaaaaggcttagt

SEQ ID NO: 54563 - DNA, 22 bp, Artificial Sequence
  chemically synthesized
atctttaaaaggcttagtgaac

SEQ ID NO: 54564 - DNA, 22 bp, Artificial Sequence
  chemically synthesized
taaaaggcttagtgaacaatat

SEQ ID NO: 54565 - DNA, 22 bp, Artificial Sequence
  chemically synthesized
aaaaggcttagtgaacaatatt

SEQ ID NO: 54566 - DNA, 22 bp, Artificial Sequence
  chemically synthesized
aaaggcttagtgaacaatattc

SEQ ID NO: 54567 - DNA, 22 bp, Artificial Sequence
  chemically synthesized
agtgaacaatattctagtcaga

SEQ ID NO: 54568 - DNA, 22 bp, Artificial Sequence
  chemically synthesized
gtgaacaatattctagtcagat

SEQ ID NO: 54569 - DNA, 22 bp, Artificial Sequence
  chemically synthesized
tagtcagatatctaattcttaa

SEQ ID NO: 54570 - DNA, 22 bp, Artificial Sequence
  chemically synthesized
gtcagatatctaattcttaaat

SEQ ID NO: 54571 - DNA, 22 bp, Artificial Sequence
  chemically synthesized
attcttaaatcctctagaagaa

SEQ ID NO: 54572 - DNA, 22 bp, Artificial Sequence
  chemically synthesized
ttaaatcctctagaagaattaa

SEQ ID NO: 54573 - DNA, 22 bp, Artificial Sequence
  chemically synthesized
aaatcctctagaagaattaact

SEQ ID NO: 54574 - DNA, 22 bp, Artificial Sequence
  chemically synthesized
aatcctctagaagaattaacta

SEQ ID NO: 54575 - DNA, 22 bp, Artificial Sequence
  chemically synthesized
tagaagaattaactaatactat

SEQ ID NO: 54576 - DNA, 22 bp, Artificial Sequence
  chemically synthesized
gaagaattaactaatactataa

SEQ ID NO: 54577 - DNA, 22 bp, Artificial Sequence
  chemically synthesized
actaatactataaaatgggtct

SEQ ID NO: 54578 - DNA, 22 bp, Artificial Sequence
  chemically synthesized
atactataaaatgggtctggat

SEQ ID NO: 54579 - DNA, 22 bp, Artificial Sequence
  chemically synthesized
taaaatgggtctggatgtagtt

SEQ ID NO: 54580 - DNA, 22 bp, Artificial Sequence
  chemically synthesized
gatgtagttctgacattatttt

SEQ ID NO: 54581 - DNA, 22 bp, Artificial Sequence
  chemically synthesized
tgacattattttataacaactg

SEQ ID NO: 54582 - DNA, 22 bp, Artificial Sequence
  chemically synthesized
acattattttataacaactggt

SEQ ID NO: 54583 - DNA, 22 bp, Artificial Sequence
  chemically synthesized
ttttataacaactggtaagagg

SEQ ID NO: 54584 - DNA, 22 bp, Artificial Sequence
  chemically synthesized
tataacaactggtaagagggag

SEQ ID NO: 54585 - DNA, 22 bp, Artificial Sequence
  chemically synthesized
ataacaactggtaagagggagt

SEQ ID NO: 54586 - DNA, 22 bp, Artificial Sequence
  chemically synthesized
taacaactggtaagagggagtg

SEQ ID NO: 54587 - DNA, 22 bp, Artificial Sequence
  chemically synthesized
gtaagagggagtgactatagca

SEQ ID NO: 54588 - DNA, 22 bp, Artificial Sequence
  chemically synthesized
tagcaacaactaaaatgatctc

SEQ ID NO: 54589 - DNA, 22 bp, Artificial Sequence
  chemically synthesized
aaatgatctcaggaaaacctgt

SEQ ID NO: 54590 - DNA, 22 bp, Artificial Sequence
  chemically synthesized
aggaaaacctgtttggccctat

SEQ ID NO: 54591 - DNA, 22 bp, Artificial Sequence
  chemically synthesized
tttggccctatgtatggtacat

SEQ ID NO: 54592 - DNA, 22 bp, Artificial Sequence
  chemically synthesized
ggccctatgtatggtacattac

SEQ ID NO: 54593 - DNA, 22 bp, Artificial Sequence
  chemically synthesized
gccctatgtatggtacattaca

SEQ ID NO: 54594 - DNA, 22 bp, Artificial Sequence
  chemically synthesized
tgtatggtacattacatctttt

SEQ ID NO: 54595 - DNA, 22 bp, Artificial Sequence
  chemically synthesized
catcttttcagtaattccactc

SEQ ID NO: 54596 - DNA, 22 bp, Artificial Sequence
  chemically synthesized
ttcagtaattccactcaaatgg

SEQ ID NO: 54597 - DNA, 22 bp, Artificial Sequence
  chemically synthesized
tcagtaattccactcaaatgga

SEQ ID NO: 54598 - DNA, 22 bp, Artificial Sequence
  chemically synthesized
cagtaattccactcaaatggag

SEQ ID NO: 54599 - DNA, 22 bp, Artificial Sequence
  chemically synthesized
agtaattccactcaaatggaga

SEQ ID NO: 54600 - DNA, 22 bp, Artificial Sequence
  chemically synthesized
cactcaaatggagacttttaac

SEQ ID NO: 54601 - DNA, 22 bp, Artificial Sequence
  chemically synthesized
aaatggagacttttaacaaagc

SEQ ID NO: 54602 - DNA, 22 bp, Artificial Sequence
  chemically synthesized
ttaacaaagcaactgttctcag

SEQ ID NO: 54603 - DNA, 22 bp, Artificial Sequence
  chemically synthesized
taacaaagcaactgttctcagg

SEQ ID NO: 54604 - DNA, 22 bp, Artificial Sequence
  chemically synthesized
aacaaagcaactgttctcaggg

SEQ ID NO: 54605 - DNA, 22 bp, Artificial Sequence
  chemically synthesized
acaaagcaactgttctcagggg

SEQ ID NO: 54606 - DNA, 22 bp, Artificial Sequence
  chemically synthesized
ttctcaggggacctattttctc

SEQ ID NO: 54607 - DNA, 22 bp, Artificial Sequence
  chemically synthesized
tcaggggacctattttctccct

SEQ ID NO: 54608 - DNA, 22 bp, Artificial Sequence
  chemically synthesized
aggggacctattttctccctta

SEQ ID NO: 54609 - DNA, 22 bp, Artificial Sequence
  chemically synthesized
ttttctcccttaaaattcatta

SEQ ID NO: 54610 - DNA, 22 bp, Artificial Sequence
  chemically synthesized
tctcccttaaaattcattatac

SEQ ID NO: 54611 - DNA, 22 bp, Artificial Sequence
  chemically synthesized
ctcccttaaaattcattataca

SEQ ID NO: 54612 - DNA, 22 bp, Artificial Sequence
  chemically synthesized
tcccttaaaattcattatacac

SEQ ID NO: 54613 - DNA, 22 bp, Artificial Sequence
  chemically synthesized
ccttaaaattcattatacacat

SEQ ID NO: 54614 - DNA, 22 bp, Artificial Sequence
  chemically synthesized
aaaattcattatacacatccct

SEQ ID NO: 54615 - DNA, 22 bp, Artificial Sequence
  chemically synthesized
aaattcattatacacatccctg

SEQ ID NO: 54616 - DNA, 22 bp, Artificial Sequence
  chemically synthesized
attatacacatccctggttgat

SEQ ID NO: 54617 - DNA, 22 bp, Artificial Sequence
  chemically synthesized
tacacatccctggttgatagca

SEQ ID NO: 54618 - DNA, 22 bp, Artificial Sequence
  chemically synthesized
gttgatagcagtgtgtctggag

SEQ ID NO: 54619 - DNA, 22 bp, Artificial Sequence
  chemically synthesized
atagcagtgtgtctggaggcag

SEQ ID NO: 54620 - DNA, 22 bp, Artificial Sequence
  chemically synthesized
gaggcagaaaccattcttgctt

SEQ ID NO: 54621 - DNA, 22 bp, Artificial Sequence
  chemically synthesized
ttgctttggaaacaattacgtc

SEQ ID NO: 54622 - DNA, 22 bp, Artificial Sequence
  chemically synthesized
gctttggaaacaattacgtctg

SEQ ID NO: 54623 - DNA, 22 bp, Artificial Sequence
  chemically synthesized
ctttggaaacaattacgtctgt

SEQ ID NO: 54624 - DNA, 22 bp, Artificial Sequence
  chemically synthesized
tggaaacaattacgtctgtgtt

SEQ ID NO: 54625 - DNA, 22 bp, Artificial Sequence
  chemically synthesized
ggaaacaattacgtctgtgtta

SEQ ID NO: 54626 - DNA, 22 bp, Artificial Sequence
  chemically synthesized
gaaacaattacgtctgtgttat

SEQ ID NO: 54627 - DNA, 22 bp, Artificial Sequence
  chemically synthesized
cgtctgtgttatactgagtagg

SEQ ID NO: 54628 - DNA, 22 bp, Artificial Sequence
  chemically synthesized
tgttatactgagtagggaagct

SEQ ID NO: 54629 - DNA, 22 bp, Artificial Sequence
  chemically synthesized
tactgagtagggaagctcatta

SEQ ID NO: 54630 - DNA, 22 bp, Artificial Sequence
  chemically synthesized
agtagggaagctcattaattgt

SEQ ID NO: 54631 - DNA, 22 bp, Artificial Sequence
  chemically synthesized
attaattgtcgacacttacgtt

SEQ ID NO: 54632 - DNA, 22 bp, Artificial Sequence
  chemically synthesized
attgtcgacacttacgttcctg

SEQ ID NO: 54633 - DNA, 22 bp, Artificial Sequence
  chemically synthesized
tcgacacttacgttcctgataa

SEQ ID NO: 54634 - DNA, 22 bp, Artificial Sequence
  chemically synthesized
acgttcctgataatgggatcag

SEQ ID NO: 54635 - DNA, 22 bp, Artificial Sequence
  chemically synthesized
cgttcctgataatgggatcagt

SEQ ID NO: 54636 - DNA, 22 bp, Artificial Sequence
  chemically synthesized
ctgataatgggatcagtgtgta

SEQ ID NO: 54637 - DNA, 22 bp, Artificial Sequence
  chemically synthesized
ataatgggatcagtgtgtaatt

SEQ ID NO: 54638 - DNA, 22 bp, Artificial Sequence
  chemically synthesized
ttgtttcgctccagatttctaa

SEQ ID NO: 54639 - DNA, 22 bp, Artificial Sequence
  chemically synthesized
gtttcgctccagatttctaata

SEQ ID NO: 54640 - DNA, 22 bp, Artificial Sequence
  chemically synthesized
tttcgctccagatttctaatac

SEQ ID NO: 54641 - DNA, 22 bp, Artificial Sequence
  chemically synthesized
cgctccagatttctaataccac

SEQ ID NO: 54642 - DNA, 22 bp, Artificial Sequence
  chemically synthesized
gctccagatttctaataccaca

SEQ ID NO: 54643 - DNA, 22 bp, Artificial Sequence
  chemically synthesized
cagatttctaataccacaaaga

SEQ ID NO: 54644 - DNA, 22 bp, Artificial Sequence
  chemically synthesized
ctaataccacaaagaataaatc

SEQ ID NO: 54645 - DNA, 22 bp, Artificial Sequence
  chemically synthesized
taataccacaaagaataaatcc

SEQ ID NO: 54646 - DNA, 22 bp, Artificial Sequence
  chemically synthesized
ataccacaaagaataaatcctt

SEQ ID NO: 54647 - DNA, 22 bp, Artificial Sequence
  chemically synthesized
tcactctgatcaattttgttaa

SEQ ID NO: 54648 - DNA, 22 bp, Artificial Sequence
  chemically synthesized
cactctgatcaattttgttaac

SEQ ID NO: 54649 - DNA, 22 bp, Artificial Sequence
  chemically synthesized
actctgatcaattttgttaact

SEQ ID NO: 54650 - DNA, 22 bp, Artificial Sequence
  chemically synthesized
tgatcaattttgttaacttctc

SEQ ID NO: 54651 - DNA, 22 bp, Artificial Sequence
  chemically synthesized
atcaattttgttaacttctcac

SEQ ID NO: 54652 - DNA, 22 bp, Artificial Sequence
  chemically synthesized
tgttaacttctcacgtgtcttc

SEQ ID NO: 54653 - DNA, 22 bp, Artificial Sequence
  chemically synthesized
gttaacttctcacgtgtcttct

SEQ ID NO: 54654 - DNA, 22 bp, Artificial Sequence
  chemically synthesized
ttaacttctcacgtgtcttctc

SEQ ID NO: 54655 - DNA, 22 bp, Artificial Sequence
  chemically synthesized
acttctcacgtgtcttctctac

SEQ ID NO: 54656 - DNA, 22 bp, Artificial Sequence
  chemically synthesized
ctcacgtgtcttctctacaccc

SEQ ID NO: 54657 - DNA, 22 bp, Artificial Sequence
  chemically synthesized
tcacgtgtcttctctacaccca

SEQ ID NO: 54658 - DNA, 22 bp, Artificial Sequence
  chemically synthesized
acgtgtcttctctacacccagg

SEQ ID NO: 54659 - DNA, 22 bp, Artificial Sequence
  chemically synthesized
ctctacacccagggcaccggtg

SEQ ID NO: 54660 - DNA, 22 bp, Artificial Sequence
  chemically synthesized
tctacacccagggcaccggtga

SEQ ID NO: 54661 - DNA, 22 bp, Artificial Sequence
  chemically synthesized
tacacccagggcaccggtgaat

SEQ ID NO: 54662 - DNA, 22 bp, Artificial Sequence
  chemically synthesized
cacccagggcaccggtgaatcc

SEQ ID NO: 54663 - DNA, 22 bp, Artificial Sequence
  chemically synthesized
tgatggtcaaagttctagatgc

SEQ ID NO: 54664 - DNA, 22 bp, Artificial Sequence
  chemically synthesized
atggtcaaagttctagatgctg

SEQ ID NO: 54665 - DNA, 22 bp, Artificial Sequence
  chemically synthesized
tagatgctgtccgaggcagtcc

SEQ ID NO: 54666 - DNA, 22 bp, Artificial Sequence
  chemically synthesized
gatgctgtccgaggcagtcctg

SEQ ID NO: 54667 - DNA, 22 bp, Artificial Sequence
  chemically synthesized
tccgaggcagtcctgccatcaa

SEQ ID NO: 54668 - DNA, 22 bp, Artificial Sequence
  chemically synthesized
ccatcaatgtggccgtgcatgt

SEQ ID NO: 54669 - DNA, 22 bp, Artificial Sequence
  chemically synthesized
agaaaggctgctgatgacacct

SEQ ID NO: 54670 - DNA, 22 bp, Artificial Sequence
  chemically synthesized
ctgatgacacctgggagccatt

SEQ ID NO: 54671 - DNA, 22 bp, Artificial Sequence
  chemically synthesized
atgacacctgggagccatttgc

SEQ ID NO: 54672 - DNA, 22 bp, Artificial Sequence
  chemically synthesized
ccaggtgtcatcagcagccttt

SEQ ID NO: 54673 - DNA, 22 bp, Artificial Sequence
  chemically synthesized
tctgaacacatgcacggccaca

SEQ ID NO: 54674 - DNA, 22 bp, Artificial Sequence
  chemically synthesized
ctgaacacatgcacggccacat

SEQ ID NO: 54675 - DNA, 22 bp, Artificial Sequence
  chemically synthesized
tgaacacatgcacggccacatt

SEQ ID NO: 54676 - DNA, 22 bp, Artificial Sequence
  chemically synthesized
aacacatgcacggccacattga

SEQ ID NO: 54677 - DNA, 22 bp, Artificial Sequence
  chemically synthesized
atggcaggactgcctcggacag

SEQ ID NO: 54678 - DNA, 22 bp, Artificial Sequence
  chemically synthesized
cctcggacagcatctagaactt

SEQ ID NO: 54679 - DNA, 22 bp, Artificial Sequence
  chemically synthesized
ggacagcatctagaactttgac

SEQ ID NO: 54680 - DNA, 22 bp, Artificial Sequence
  chemically synthesized
gaactttgaccatcagaggaca

SEQ ID NO: 54681 - DNA, 22 bp, Artificial Sequence
  chemically synthesized
tgaccatcagaggacacttgga

SEQ ID NO: 54682 - DNA, 22 bp, Artificial Sequence
  chemically synthesized
gaccatcagaggacacttggat

SEQ ID NO: 54683 - DNA, 22 bp, Artificial Sequence
  chemically synthesized
accatcagaggacacttggatt

SEQ ID NO: 54684 - DNA, 22 bp, Artificial Sequence
  chemically synthesized
ggattcaccggtgccctgggtg

SEQ ID NO: 54685 - DNA, 22 bp, Artificial Sequence
  chemically synthesized
gattcaccggtgccctgggtgt

SEQ ID NO: 54686 - DNA, 22 bp, Artificial Sequence
  chemically synthesized
accggtgccctgggtgtagaga

SEQ ID NO: 54687 - DNA, 22 bp, Artificial Sequence
  chemically synthesized
ggtgtagagaagacacgtgaga

SEQ ID NO: 54688 - DNA, 22 bp, Artificial Sequence
  chemically synthesized
acaaaattgatcagagtgaaag

SEQ ID NO: 54689 - DNA, 22 bp, Artificial Sequence
  chemically synthesized
atcagagtgaaaggatttattc

SEQ ID NO: 54690 - DNA, 22 bp, Artificial Sequence
  chemically synthesized
attctttgtggtattagaaatc

SEQ ID NO: 54691 - DNA, 22 bp, Artificial Sequence
  chemically synthesized
ttctttgtggtattagaaatct

SEQ ID NO: 54692 - DNA, 22 bp, Artificial Sequence
  chemically synthesized
tttgtggtattagaaatctgga

SEQ ID NO: 54693 - DNA, 22 bp, Artificial Sequence
  chemically synthesized
tgtggtattagaaatctggagc

SEQ ID NO: 54694 - DNA, 22 bp, Artificial Sequence
  chemically synthesized
gtggtattagaaatctggagcg

SEQ ID NO: 54695 - DNA, 22 bp, Artificial Sequence
  chemically synthesized
tggtattagaaatctggagcga

SEQ ID NO: 54696 - DNA, 22 bp, Artificial Sequence
  chemically synthesized
gaaatctggagcgaaacaagaa

SEQ ID NO: 54697 - DNA, 22 bp, Artificial Sequence
  chemically synthesized
gagcgaaacaagaattacacac

SEQ ID NO: 54698 - DNA, 22 bp, Artificial Sequence
  chemically synthesized
cacactgatcccattatcagga

SEQ ID NO: 54699 - DNA, 22 bp, Artificial Sequence
  chemically synthesized
atcccattatcaggaacgtaag

SEQ ID NO: 54700 - DNA, 22 bp, Artificial Sequence
  chemically synthesized
tcaggaacgtaagtgtcgacaa

SEQ ID NO: 54701 - DNA, 22 bp, Artificial Sequence
  chemically synthesized
atgagcttccctactcagtata

SEQ ID NO: 54702 - DNA, 22 bp, Artificial Sequence
  chemically synthesized
ccctactcagtataacacagac

SEQ ID NO: 54703 - DNA, 22 bp, Artificial Sequence
  chemically synthesized
cctactcagtataacacagacg

SEQ ID NO: 54704 - DNA, 22 bp, Artificial Sequence
  chemically synthesized
ctcagtataacacagacgtaat

SEQ ID NO: 54705 - DNA, 22 bp, Artificial Sequence
  chemically synthesized
agtataacacagacgtaattgt

SEQ ID NO: 54706 - DNA, 22 bp, Artificial Sequence
  chemically synthesized
tttccaaagcaagaatggtttc

SEQ ID NO: 54707 - DNA, 22 bp, Artificial Sequence
  chemically synthesized
ccaaagcaagaatggtttctgc

SEQ ID NO: 54708 - DNA, 22 bp, Artificial Sequence
  chemically synthesized
caaagcaagaatggtttctgcc

SEQ ID NO: 54709 - DNA, 22 bp, Artificial Sequence
  chemically synthesized
ctgcctccagacacactgctat

SEQ ID NO: 54710 - DNA, 22 bp, Artificial Sequence
  chemically synthesized
tgcctccagacacactgctatc

SEQ ID NO: 54711 - DNA, 22 bp, Artificial Sequence
  chemically synthesized
cctccagacacactgctatcaa

SEQ ID NO: 54712 - DNA, 22 bp, Artificial Sequence
  chemically synthesized
cagacacactgctatcaaccag

SEQ ID NO: 54713 - DNA, 22 bp, Artificial Sequence
  chemically synthesized
ctatcaaccagggatgtgtata

SEQ ID NO: 54714 - DNA, 22 bp, Artificial Sequence
  chemically synthesized
tcaaccagggatgtgtataatg

SEQ ID NO: 54715 - DNA, 22 bp, Artificial Sequence
  chemically synthesized
taagggagaaaataggtcccct

SEQ ID NO: 54716 - DNA, 22 bp, Artificial Sequence
  chemically synthesized
aagggagaaaataggtcccctg

SEQ ID NO: 54717 - DNA, 22 bp, Artificial Sequence
  chemically synthesized
agggagaaaataggtcccctga

SEQ ID NO: 54718 - DNA, 22 bp, Artificial Sequence
  chemically synthesized
agaacagttgctttgttaaaag

SEQ ID NO: 54719 - DNA, 22 bp, Artificial Sequence
  chemically synthesized
ctttgttaaaagtctccatttg

SEQ ID NO: 54720 - DNA, 22 bp, Artificial Sequence
  chemically synthesized
tgttaaaagtctccatttgagt

SEQ ID NO: 54721 - DNA, 22 bp, Artificial Sequence
  chemically synthesized
gttaaaagtctccatttgagtg

SEQ ID NO: 54722 - DNA, 22 bp, Artificial Sequence
  chemically synthesized
ttaaaagtctccatttgagtgg

SEQ ID NO: 54723 - DNA, 22 bp, Artificial Sequence
  chemically synthesized
aaagtctccatttgagtggaat

SEQ ID NO: 54724 - DNA, 22 bp, Artificial Sequence
  chemically synthesized
catttgagtggaattactgaaa

SEQ ID NO: 54725 - DNA, 22 bp, Artificial Sequence
  chemically synthesized
gagtggaattactgaaaagatg

SEQ ID NO: 54726 - DNA, 22 bp, Artificial Sequence
  chemically synthesized
agtggaattactgaaaagatgt

SEQ ID NO: 54727 - DNA, 22 bp, Artificial Sequence
  chemically synthesized
ctgaaaagatgtaatgtaccat

SEQ ID NO: 54728 - DNA, 22 bp, Artificial Sequence
  chemically synthesized
aaaagatgtaatgtaccataca

SEQ ID NO: 54729 - DNA, 22 bp, Artificial Sequence
  chemically synthesized
tcctgagatcattttagttgtt

SEQ ID NO: 54730 - DNA, 22 bp, Artificial Sequence
  chemically synthesized
cctgagatcattttagttgttg

SEQ ID NO: 54731 - DNA, 22 bp, Artificial Sequence
  chemically synthesized
ctgagatcattttagttgttgc

SEQ ID NO: 54732 - DNA, 22 bp, Artificial Sequence
  chemically synthesized
agatcattttagttgttgctat

SEQ ID NO: 54733 - DNA, 22 bp, Artificial Sequence
  chemically synthesized
tagttgttgctatagtcactcc

SEQ ID NO: 54734 - DNA, 22 bp, Artificial Sequence
  chemically synthesized
agttgttgctatagtcactccc

SEQ ID NO: 54735 - DNA, 22 bp, Artificial Sequence
  chemically synthesized
gttgttgctatagtcactccct

SEQ ID NO: 54736 - DNA, 22 bp, Artificial Sequence
  chemically synthesized
ttgctatagtcactccctctta

SEQ ID NO: 54737 - DNA, 22 bp, Artificial Sequence
  chemically synthesized
ctatagtcactccctcttacca

SEQ ID NO: 54738 - DNA, 22 bp, Artificial Sequence
  chemically synthesized
tagtcactccctcttaccagtt

SEQ ID NO: 54739 - DNA, 22 bp, Artificial Sequence
  chemically synthesized
cctcttaccagttgttataaaa

SEQ ID NO: 54740 - DNA, 22 bp, Artificial Sequence
  chemically synthesized
ttaccagttgttataaaataat

SEQ ID NO: 54741 - DNA, 22 bp, Artificial Sequence
  chemically synthesized
accagttgttataaaataatgt

SEQ ID NO: 54742 - DNA, 22 bp, Artificial Sequence
  chemically synthesized
ccagttgttataaaataatgtc

SEQ ID NO: 54743 - DNA, 22 bp, Artificial Sequence
  chemically synthesized
ttataaaataatgtcagaacta

SEQ ID NO: 54744 - DNA, 22 bp, Artificial Sequence
  chemically synthesized
taaaataatgtcagaactacat

SEQ ID NO: 54745 - DNA, 22 bp, Artificial Sequence
  chemically synthesized
catccagacccattttatagta

SEQ ID NO: 54746 - DNA, 22 bp, Artificial Sequence
  chemically synthesized
tatagtattagttaattcttct

SEQ ID NO: 54747 - DNA, 22 bp, Artificial Sequence
  chemically synthesized
atagtattagttaattcttcta

SEQ ID NO: 54748 - DNA, 22 bp, Artificial Sequence
  chemically synthesized
tagtattagttaattcttctag

SEQ ID NO: 54749 - DNA, 22 bp, Artificial Sequence
  chemically synthesized
gttaattcttctagaggattta

SEQ ID NO: 54750 - DNA, 22 bp, Artificial Sequence
  chemically synthesized
attcttctagaggatttaagaa

SEQ ID NO: 54751 - DNA, 22 bp, Artificial Sequence
  chemically synthesized
ttctagaggatttaagaattag

SEQ ID NO: 54752 - DNA, 22 bp, Artificial Sequence
  chemically synthesized
ctagaggatttaagaattagat

SEQ ID NO: 54753 - DNA, 22 bp, Artificial Sequence
  chemically synthesized
tagaggatttaagaattagata

SEQ ID NO: 54754 - DNA, 22 bp, Artificial Sequence
  chemically synthesized
gaggatttaagaattagatatc

SEQ ID NO: 54755 - DNA, 22 bp, Artificial Sequence
  chemically synthesized
aagaattagatatctgactaga

SEQ ID NO: 54756 - DNA, 22 bp, Artificial Sequence
  chemically synthesized
agaattagatatctgactagaa

SEQ ID NO: 54757 - DNA, 22 bp, Artificial Sequence
  chemically synthesized
gatatctgactagaatattgtt

SEQ ID NO: 54758 - DNA, 22 bp, Artificial Sequence
  chemically synthesized
actagaatattgttcactaagc

SEQ ID NO: 54759 - DNA, 22 bp, Artificial Sequence
  chemically synthesized
gaatattgttcactaagccttt

SEQ ID NO: 54760 - DNA, 22 bp, Artificial Sequence
  chemically synthesized
ttcactaagccttttaaagatt

SEQ ID NO: 54761 - DNA, 22 bp, Artificial Sequence
  chemically synthesized
actaagccttttaaagattaat

SEQ ID NO: 54762 - DNA, 22 bp, Artificial Sequence
  chemically synthesized
agccttttaaagattaatcaat

SEQ ID NO: 54763 - DNA, 22 bp, Artificial Sequence
  chemically synthesized
ttaaagattaatcaataaatac

SEQ ID NO: 54764 - DNA, 22 bp, Artificial Sequence
  chemically synthesized
taaagattaatcaataaatacg

SEQ ID NO: 54765 - DNA, 22 bp, Artificial Sequence
  chemically synthesized
aaagattaatcaataaatacgt

SEQ ID NO: 54766 - DNA, 22 bp, Artificial Sequence
  chemically synthesized
aagattaatcaataaatacgtt

SEQ ID NO: 54767 - DNA, 22 bp, Artificial Sequence
  chemically synthesized
atcaataaatacgttttgaata

SEQ ID NO: 54768 - DNA, 22 bp, Artificial Sequence
  chemically synthesized
tgaataactatagggccagaat

SEQ ID NO: 54769 - DNA, 22 bp, Artificial Sequence
  chemically synthesized
gaataactatagggccagaata

SEQ ID NO: 54770 - DNA, 22 bp, Artificial Sequence
  chemically synthesized
aataactatagggccagaatat

SEQ ID NO: 54771 - DNA, 22 bp, Artificial Sequence
  chemically synthesized
tagggccagaatataatctcct

SEQ ID NO: 54772 - DNA, 22 bp, Artificial Sequence
  chemically synthesized
ctgcagtttgtcccccaaatac

SEQ ID NO: 54773 - DNA, 22 bp, Artificial Sequence
  chemically synthesized
cagtttgtcccccaaatacatt

SEQ ID NO: 54774 - DNA, 22 bp, Artificial Sequence
  chemically synthesized
gtcccccaaatacattttatgg

SEQ ID NO: 54775 - DNA, 22 bp, Artificial Sequence
  chemically synthesized
tcccccaaatacattttatgga

SEQ ID NO: 54776 - DNA, 22 bp, Artificial Sequence
  chemically synthesized
tatggagggatacttttctgaa

SEQ ID NO: 54777 - DNA, 22 bp, Artificial Sequence
  chemically synthesized
atggagggatacttttctgaaa

SEQ ID NO: 54778 - DNA, 22 bp, Artificial Sequence
  chemically synthesized
tggagggatacttttctgaaaa

SEQ ID NO: 54779 - DNA, 22 bp, Artificial Sequence
  chemically synthesized
ttctgaaaattcagtattaaca

SEQ ID NO: 54780 - DNA, 22 bp, Artificial Sequence
  chemically synthesized
tctgaaaattcagtattaacag

SEQ ID NO: 54781 - DNA, 22 bp, Artificial Sequence
  chemically synthesized
ctgaaaattcagtattaacagc

SEQ ID NO: 54782 - DNA, 22 bp, Artificial Sequence
  chemically synthesized
tgaaaattcagtattaacagct

SEQ ID NO: 54783 - DNA, 22 bp, Artificial Sequence
  chemically synthesized
aaaattcagtattaacagcttc

SEQ ID NO: 54784 - DNA, 22 bp, Artificial Sequence
  chemically synthesized
agtattaacagcttccttaata

SEQ ID NO: 54785 - DNA, 22 bp, Artificial Sequence
  chemically synthesized
acagcttccttaatatcatatc

SEQ ID NO: 54786 - DNA, 22 bp, Artificial Sequence
  chemically synthesized
ccttaatatcatatctttattt

SEQ ID NO: 54787 - DNA, 22 bp, Artificial Sequence
  chemically synthesized
cttaatatcatatctttatttc

SEQ ID NO: 54788 - DNA, 22 bp, Artificial Sequence
  chemically synthesized
aatatcatatctttatttctat

SEQ ID NO: 54789 - DNA, 22 bp, Artificial Sequence
  chemically synthesized
atatcatatctttatttctatc

SEQ ID NO: 54790 - DNA, 22 bp, Artificial Sequence
  chemically synthesized
tatttctatcatctatctgagg

SEQ ID NO: 54791 - DNA, 22 bp, Artificial Sequence
  chemically synthesized
atttctatcatctatctgagga

SEQ ID NO: 54792 - DNA, 22 bp, Artificial Sequence
  chemically synthesized
tttctatcatctatctgaggaa

SEQ ID NO: 54793 - DNA, 22 bp, Artificial Sequence
  chemically synthesized
ctatcatctatctgaggaaaca

SEQ ID NO: 54794 - DNA, 22 bp, Artificial Sequence
  chemically synthesized
tatcatctatctgaggaaacag

SEQ ID NO: 54795 - DNA, 22 bp, Artificial Sequence
  chemically synthesized
tcatctatctgaggaaacagag

SEQ ID NO: 54796 - DNA, 22 bp, Artificial Sequence
  chemically synthesized
tctgaggaaacagaggtaccag

SEQ ID NO: 54797 - DNA, 22 bp, Artificial Sequence
  chemically synthesized
aggaaacagaggtaccagatat

SEQ ID NO: 54798 - DNA, 22 bp, Artificial Sequence
  chemically synthesized
caaacctaatgcaccaaagcaa

SEQ ID NO: 54799 - DNA, 22 bp, Artificial Sequence
  chemically synthesized
atgcaccaaagcaatgaggtag

SEQ ID NO: 54800 - DNA, 22 bp, Artificial Sequence
  chemically synthesized
agagttcaagtcccagctcagt

SEQ ID NO: 54801 - DNA, 22 bp, Artificial Sequence
  chemically synthesized
aagtcccagctcagtaagctca

SEQ ID NO: 54802 - DNA, 22 bp, Artificial Sequence
  chemically synthesized
agtaagctcagtggaacttcat

SEQ ID NO: 54803 - DNA, 22 bp, Artificial Sequence
  chemically synthesized
agtggaacttcattctttttga

SEQ ID NO: 54804 - DNA, 22 bp, Artificial Sequence
  chemically synthesized
cattctttttgaagtttgaatt

SEQ ID NO: 54805 - DNA, 22 bp, Artificial Sequence
  chemically synthesized
attctttttgaagtttgaatta

SEQ ID NO: 54806 - DNA, 22 bp, Artificial Sequence
  chemically synthesized
tttttgaagtttgaattaatta

SEQ ID NO: 54807 - DNA, 22 bp, Artificial Sequence
  chemically synthesized
tttgaagtttgaattaattata

SEQ ID NO: 54808 - DNA, 22 bp, Artificial Sequence
  chemically synthesized
ttgaagtttgaattaattatat

SEQ ID NO: 54809 - DNA, 22 bp, Artificial Sequence
  chemically synthesized
tgaagtttgaattaattatatt

SEQ ID NO: 54810 - DNA, 22 bp, Artificial Sequence
  chemically synthesized
gaagtttgaattaattatatta

SEQ ID NO: 54811 - DNA, 22 bp, Artificial Sequence
  chemically synthesized
aagtttgaattaattatattaa

SEQ ID NO: 54812 - DNA, 22 bp, Artificial Sequence
  chemically synthesized
gaattaattatattaaaaatag

SEQ ID NO: 54813 - DNA, 22 bp, Artificial Sequence
  chemically synthesized
aattaattatattaaaaataga

SEQ ID NO: 54814 - DNA, 22 bp, Artificial Sequence
  chemically synthesized
attatattaaaaatagatgctg

SEQ ID NO: 54815 - DNA, 22 bp, Artificial Sequence
  chemically synthesized
tattaaaaatagatgctgggta

SEQ ID NO: 54816 - DNA, 22 bp, Artificial Sequence
  chemically synthesized
aaaatagatgctgggtaccctt

SEQ ID NO: 54817 - DNA, 22 bp, Artificial Sequence
  chemically synthesized
ggtacccttgccctagtaataa

SEQ ID NO: 54818 - DNA, 22 bp, Artificial Sequence
  chemically synthesized
gccctagtaataaaagctggtt

SEQ ID NO: 54819 - DNA, 22 bp, Artificial Sequence
  chemically synthesized
ccctagtaataaaagctggttg

SEQ ID NO: 54820 - DNA, 22 bp, Artificial Sequence
  chemically synthesized
gtaataaaagctggttggcaaa

SEQ ID NO: 54821 - DNA, 22 bp, Artificial Sequence
  chemically synthesized
gttggcaaagctggaaggagtc

SEQ ID NO: 54822 - DNA, 22 bp, Artificial Sequence
  chemically synthesized
gcaaagctggaaggagtcactt

SEQ ID NO: 54823 - DNA, 22 bp, Artificial Sequence
  chemically synthesized
gaaggagtcacttctacttcat

SEQ ID NO: 54824 - DNA, 22 bp, Artificial Sequence
  chemically synthesized
ctacttcatttagcgtgaatct

SEQ ID NO: 54825 - DNA, 22 bp, Artificial Sequence
  chemically synthesized
tacttcatttagcgtgaatctt

SEQ ID NO: 54826 - DNA, 22 bp, Artificial Sequence
  chemically synthesized
cttcatttagcgtgaatcttaa

SEQ ID NO: 54827 - DNA, 22 bp, Artificial Sequence
  chemically synthesized
catttagcgtgaatcttaaatg

SEQ ID NO: 54828 - DNA, 22 bp, Artificial Sequence
  chemically synthesized
atttagcgtgaatcttaaatgt

SEQ ID NO: 54829 - DNA, 22 bp, Artificial Sequence
  chemically synthesized
agcgtgaatcttaaatgtagga

SEQ ID NO: 54830 - DNA, 22 bp, Artificial Sequence
  chemically synthesized
gcgtgaatcttaaatgtaggaa

SEQ ID NO: 54831 - DNA, 22 bp, Artificial Sequence
  chemically synthesized
aaatgtaggaatgggatgtcac

SEQ ID NO: 54832 - DNA, 22 bp, Artificial Sequence
  chemically synthesized
aatgtaggaatgggatgtcaca

SEQ ID NO: 54833 - DNA, 22 bp, Artificial Sequence
  chemically synthesized
accgtagggccagcctcagaca

SEQ ID NO: 54834 - DNA, 22 bp, Artificial Sequence
  chemically synthesized
agacacaaataccagtccagca

SEQ ID NO: 54835 - DNA, 22 bp, Artificial Sequence
  chemically synthesized
ccaagaatgagtggacttctgt

SEQ ID NO: 54836 - DNA, 22 bp, Artificial Sequence
  chemically synthesized
ctgtgatggctgctcccagcct

SEQ ID NO: 54837 - DNA, 22 bp, Artificial Sequence
  chemically synthesized
tgtgatggctgctcccagcctg

SEQ ID NO: 54838 - DNA, 22 bp, Artificial Sequence
  chemically synthesized
tgatggctgctcccagcctggg

SEQ ID NO: 54839 - DNA, 22 bp, Artificial Sequence
  chemically synthesized
ctcccagcctggggcttttata

SEQ ID NO: 54840 - DNA, 22 bp, Artificial Sequence
  chemically synthesized
ccagcctggggcttttatactc

SEQ ID NO: 54841 - DNA, 22 bp, Artificial Sequence
  chemically synthesized
gggcttttatactcacttctcc

SEQ ID NO: 54842 - DNA, 22 bp, Artificial Sequence
  chemically synthesized
ttatactcacttctcctgagct

SEQ ID NO: 54843 - DNA, 22 bp, Artificial Sequence
  chemically synthesized
tatactcacttctcctgagcta

SEQ ID NO: 54844 - DNA, 22 bp, Artificial Sequence
  chemically synthesized
atactcacttctcctgagctag

SEQ ID NO: 54845 - DNA, 22 bp, Artificial Sequence
  chemically synthesized
tactcacttctcctgagctagg

SEQ ID NO: 54846 - DNA, 22 bp, Artificial Sequence
  chemically synthesized
acttctcctgagctaggctgct

SEQ ID NO: 54847 - DNA, 22 bp, Artificial Sequence
  chemically synthesized
ctcctgagctaggctgcttatc

SEQ ID NO: 54848 - DNA, 22 bp, Artificial Sequence
  chemically synthesized
tcctgagctaggctgcttatcc

SEQ ID NO: 54849 - DNA, 22 bp, Artificial Sequence
  chemically synthesized
ctgagctaggctgcttatccct

SEQ ID NO: 54850 - DNA, 22 bp, Artificial Sequence
  chemically synthesized
agctaggctgcttatccctgcc

SEQ ID NO: 54851 - DNA, 22 bp, Artificial Sequence
  chemically synthesized
ggctgcttatccctgccaatct

SEQ ID NO: 54852 - DNA, 22 bp, Artificial Sequence
  chemically synthesized
cttatccctgccaatctgactg

SEQ ID NO: 54853 - DNA, 22 bp, Artificial Sequence
  chemically synthesized
atccctgccaatctgactgcaa

SEQ ID NO: 54854 - DNA, 22 bp, Artificial Sequence
  chemically synthesized
tccctgccaatctgactgcaaa

SEQ ID NO: 54855 - DNA, 22 bp, Artificial Sequence
  chemically synthesized
ccaatctgactgcaaacctgct

SEQ ID NO: 54856 - DNA, 22 bp, Artificial Sequence
  chemically synthesized
actgcaaacctgctgattctga

SEQ ID NO: 54857 - DNA, 22 bp, Artificial Sequence
  chemically synthesized
caaacctgctgattctgattat

SEQ ID NO: 54858 - DNA, 22 bp, Artificial Sequence
  chemically synthesized
ctgattctgattattgacttag

SEQ ID NO: 54859 - DNA, 22 bp, Artificial Sequence
  chemically synthesized
attctgattattgacttagtca

SEQ ID NO: 54860 - DNA, 23 bp, Artificial Sequence
  chemically synthesized
  misc_feature (1)..(21): n is a, c, g, or t
nnnnnnnnnnnnnnnnnnnnnrg

SEQ ID NO: 54861 - protein, 9 aa, Artificial Sequence
  chemically synthesized
LAGLIDADG

SEQ ID NO: 54862 - DNA, 20 bp, Artificial Sequence
  chemically synthesized
ctcattcatttcatacacac

SEQ ID NO: 54863 - DNA, 20 bp, Artificial Sequence
  chemically synthesized
tctctcagaatgacaattct

SEQ ID NO: 54864 - DNA, 20 bp, Artificial Sequence
  chemically synthesized
acaattctaggtacaacttt

SEQ ID NO: 54865 - DNA, 20 bp, Artificial Sequence
  chemically synthesized
tctaggtacaacttttggca

SEQ ID NO: 54866 - DNA, 20 bp, Artificial Sequence
  chemically synthesized
tctttacttcaagtcgtttc

SEQ ID NO: 54867 - DNA, 20 bp, Artificial Sequence
  chemically synthesized
caagtcgtttctggagaaag

SEQ ID NO: 54868 - DNA, 20 bp, Artificial Sequence
  chemically synthesized
gaaagtggctatgctcaaaa

SEQ ID NO: 54869 - DNA, 20 bp, Artificial Sequence
  chemically synthesized
gtcatttctaagttttctta

SEQ ID NO: 54870 - DNA, 20 bp, Artificial Sequence
  chemically synthesized
ctaagttttcttatggattt

SEQ ID NO: 54871 - DNA, 20 bp, Artificial Sequence
  chemically synthesized
attttggattatctgtagca

SEQ ID NO: 54872 - DNA, 20 bp, Artificial Sequence
  chemically synthesized
attatctgtagcatggtttc

SEQ ID NO: 54873 - DNA, 20 bp, Artificial Sequence
  chemically synthesized
ttccctaacagacctgagtc

SEQ ID NO: 54874 - DNA, 20 bp, Artificial Sequence
  chemically synthesized
aacagacctgagtcaggcac

SEQ ID NO: 54875 - DNA, 20 bp, Artificial Sequence
  chemically synthesized
acagacctgagtcaggcact

SEQ ID NO: 54876 - DNA, 20 bp, Artificial Sequence
  chemically synthesized
taatgtttaaccaccatgac

SEQ ID NO: 54877 - DNA, 20 bp, Artificial Sequence
  chemically synthesized
aatgtttaaccaccatgaca

SEQ ID NO: 54878 - DNA, 20 bp, Artificial Sequence
  chemically synthesized
atgtttaaccaccatgacag

SEQ ID NO: 54879 - DNA, 20 bp, Artificial Sequence
  chemically synthesized
tgtttaaccaccatgacagg

SEQ ID NO: 54880 - DNA, 20 bp, Artificial Sequence
  chemically synthesized
taaccaccatgacagggggc

SEQ ID NO: 54881 - DNA, 20 bp, Artificial Sequence
  chemically synthesized
aaccaccatgacagggggca

SEQ ID NO: 54882 - DNA, 20 bp, Artificial Sequence
  chemically synthesized
accaccatgacagggggcag

SEQ ID NO: 54883 - DNA, 20 bp, Artificial Sequence
  chemically synthesized
ggggcaggggatcaatacta

SEQ ID NO: 54884 - DNA, 20 bp, Artificial Sequence
  chemically synthesized
gggcaggggatcaatactat

SEQ ID NO: 54885 - DNA, 20 bp, Artificial Sequence
  chemically synthesized
caggggatcaatactatggg

SEQ ID NO: 54886 - DNA, 20 bp, Artificial Sequence
  chemically synthesized
agacctcagtattctcaaga

SEQ ID NO: 54887 - DNA, 20 bp, Artificial Sequence
  chemically synthesized
gatgctatgactgtacttgt

SEQ ID NO: 54888 - DNA, 20 bp, Artificial Sequence
  chemically synthesized
caaagtaattttaccttgtc

SEQ ID NO: 54889 - DNA, 20 bp, Artificial Sequence
  chemically synthesized
accttgtcaggagatcaaac

SEQ ID NO: 54890 - DNA, 20 bp, Artificial Sequence
  chemically synthesized
atcctgaaagcataactttc

SEQ ID NO: 54891 - DNA, 20 bp, Artificial Sequence
  chemically synthesized
aaagcataactttcaggata

SEQ ID NO: 54892 - DNA, 20 bp, Artificial Sequence
  chemically synthesized
atcctcagcacctaaatcag

SEQ ID NO: 54893 - DNA, 20 bp, Artificial Sequence
  chemically synthesized
ttgcctccacaccaacaaat

SEQ ID NO: 54894 - DNA, 20 bp, Artificial Sequence
  chemically synthesized
ccatatgtaataattctttt

SEQ ID NO: 54895 - DNA, 20 bp, Artificial Sequence
  chemically synthesized
catatgtaataattcttttt

SEQ ID NO: 54896 - DNA, 20 bp, Artificial Sequence
  chemically synthesized
attgtaattataacaaaact

SEQ ID NO: 54897 - DNA, 20 bp, Artificial Sequence
  chemically synthesized
cagaagcttctaacagcagc

SEQ ID NO: 54898 - DNA, 20 bp, Artificial Sequence
  chemically synthesized
aagcttctaacagcagcagg

SEQ ID NO: 54899 - DNA, 20 bp, Artificial Sequence
  chemically synthesized
taacagcagcaggaggcatg

SEQ ID NO: 54900 - DNA, 20 bp, Artificial Sequence
  chemically synthesized
aacagcagcaggaggcatgt

SEQ ID NO: 54901 - DNA, 20 bp, Artificial Sequence
  chemically synthesized
tttaagagttaaaaactatt

SEQ ID NO: 54902 - DNA, 20 bp, Artificial Sequence
  chemically synthesized
tttgagtcatgtaattacga

SEQ ID NO: 54903 - DNA, 20 bp, Artificial Sequence
  chemically synthesized
agtcatgtaattacgaagga

SEQ ID NO: 54904 - DNA, 20 bp, Artificial Sequence
  chemically synthesized
tccctagaattttctcatta

SEQ ID NO: 54905 - DNA, 20 bp, Artificial Sequence
  chemically synthesized
ccctagaattttctcattaa

SEQ ID NO: 54906 - DNA, 20 bp, Artificial Sequence
  chemically synthesized
acagtatatgactcacttta

SEQ ID NO: 54907 - DNA, 20 bp, Artificial Sequence
  chemically synthesized
cagtatatgactcactttat

SEQ ID NO: 54908 - DNA, 20 bp, Artificial Sequence
  chemically synthesized
agtatatgactcactttatg

SEQ ID NO: 54909 - DNA, 20 bp, Artificial Sequence
  chemically synthesized
gtatatgactcactttatgg

SEQ ID NO: 54910 - DNA, 20 bp, Artificial Sequence
  chemically synthesized
ttctatgctaaactttgcct

SEQ ID NO: 54911 - DNA, 20 bp, Artificial Sequence
  chemically synthesized
tggatttccacaaagactga

SEQ ID NO: 54912 - DNA, 20 bp, Artificial Sequence
  chemically synthesized
ggatttccacaaagactgat

SEQ ID NO: 54913 - DNA, 20 bp, Artificial Sequence
  chemically synthesized
tttccacaaagactgatggg

SEQ ID NO: 54914 - DNA, 20 bp, Artificial Sequence
  chemically synthesized
cacaaagactgatgggaggc

SEQ ID NO: 54915 - DNA, 20 bp, Artificial Sequence
  chemically synthesized
ctatactcactagttcaccc

SEQ ID NO: 54916 - DNA, 20 bp, Artificial Sequence
  chemically synthesized
taagaatgctagttgaaagc

SEQ ID NO: 54917 - DNA, 20 bp, Artificial Sequence
  chemically synthesized
aagaatgctagttgaaagct

SEQ ID NO: 54918 - DNA, 20 bp, Artificial Sequence
  chemically synthesized
cgtcaaaatacttcccagtt

SEQ ID NO: 54919 - DNA, 20 bp, Artificial Sequence
  chemically synthesized
gtcaaaatacttcccagttt

SEQ ID NO: 54920 - DNA, 20 bp, Artificial Sequence
  chemically synthesized
tcaaaatacttcccagtttg

SEQ ID NO: 54921 - DNA, 20 bp, Artificial Sequence
  chemically synthesized
tacttcccagtttggggtat

SEQ ID NO: 54922 - DNA, 20 bp, Artificial Sequence
  chemically synthesized
tcaattttctgatcatcaca

SEQ ID NO: 54923 - DNA, 20 bp, Artificial Sequence
  chemically synthesized
aaggatgatcaagagaagaa

SEQ ID NO: 54924 - DNA, 20 bp, Artificial Sequence
  chemically synthesized
aggatgatcaagagaagaaa

SEQ ID NO: 54925 - DNA, 20 bp, Artificial Sequence
  chemically synthesized
atcaactaactccattcagt

SEQ ID NO: 54926 - DNA, 20 bp, Artificial Sequence
  chemically synthesized
agaagacttctagatgacac

SEQ ID NO: 54927 - DNA, 20 bp, Artificial Sequence
  chemically synthesized
ccacacaatttaaattttta

SEQ ID NO: 54928 - DNA, 20 bp, Artificial Sequence
  chemically synthesized
agaagttgcctacctgacag

SEQ ID NO: 54929 - DNA, 20 bp, Artificial Sequence
  chemically synthesized
cctacctgacagaggaccac

SEQ ID NO: 54930 - DNA, 20 bp, Artificial Sequence
  chemically synthesized
ctgtccagctctaacaccac

SEQ ID NO: 54931 - DNA, 20 bp, Artificial Sequence
  chemically synthesized
cacattttataagtcattga

SEQ ID NO: 54932 - DNA, 20 bp, Artificial Sequence
  chemically synthesized
acattttataagtcattgaa

SEQ ID NO: 54933 - DNA, 20 bp, Artificial Sequence
  chemically synthesized
tcattgaagggaatttttct

SEQ ID NO: 54934 - DNA, 20 bp, Artificial Sequence
  chemically synthesized
tcctaaaacacagccatttt

SEQ ID NO: 54935 - DNA, 20 bp, Artificial Sequence
  chemically synthesized
aacacagccattttaggtgc

SEQ ID NO: 54936 - DNA, 20 bp, Artificial Sequence
  chemically synthesized
tgcaggaaacagtgtataaa

SEQ ID NO: 54937 - DNA, 20 bp, Artificial Sequence
  chemically synthesized
gtatgctttgccagactgag

SEQ ID NO: 54938 - DNA, 20 bp, Artificial Sequence
  chemically synthesized
tttgccagactgagtggcag

SEQ ID NO: 54939 - DNA, 20 bp, Artificial Sequence
  chemically synthesized
ttgccagactgagtggcagt

SEQ ID NO: 54940 - DNA, 20 bp, Artificial Sequence
  chemically synthesized
agtgggagtcctttgttatg

SEQ ID NO: 54941 - DNA, 20 bp, Artificial Sequence
  chemically synthesized
gtgggagtcctttgttatgt

SEQ ID NO: 54942 - DNA, 20 bp, Artificial Sequence
  chemically synthesized
tgaagacaaagccgacccac

SEQ ID NO: 54943 - DNA, 20 bp, Artificial Sequence
  chemically synthesized
acatgttctgtgtatagaat

SEQ ID NO: 54944 - DNA, 20 bp, Artificial Sequence
  chemically synthesized
tgttctgtgtatagaattgg

SEQ ID NO: 54945 - DNA, 20 bp, Artificial Sequence
  chemically synthesized
ttggtggaagagaaaatgtc

SEQ ID NO: 54946 - DNA, 20 bp, Artificial Sequence
  chemically synthesized
gaaaatgtcaggacagtgtg

SEQ ID NO: 54947 - DNA, 20 bp, Artificial Sequence
  chemically synthesized
agtgtgaggactgccatgta

SEQ ID NO: 54948 - DNA, 20 bp, Artificial Sequence
  chemically synthesized
ttagaaagctaccactgcac

SEQ ID NO: 54949 - DNA, 20 bp, Artificial Sequence
  chemically synthesized
tagaaagctaccactgcaca

SEQ ID NO: 54950 - DNA, 20 bp, Artificial Sequence
  chemically synthesized
atctaagtctacaaaattag

SEQ ID NO: 54951 - DNA, 20 bp, Artificial Sequence
  chemically synthesized
tctaagtctacaaaattagt

SEQ ID NO: 54952 - DNA, 20 bp, Artificial Sequence
  chemically synthesized
tatttcgtgctgtcatcaga

SEQ ID NO: 54953 - DNA, 20 bp, Artificial Sequence
  chemically synthesized
ttcgtgctgtcatcagaagg

SEQ ID NO: 54954 - DNA, 20 bp, Artificial Sequence
  chemically synthesized
tcgtgctgtcatcagaagga

SEQ ID NO: 54955 - DNA, 20 bp, Artificial Sequence
  chemically synthesized
actacataaagagcttttgc

SEQ ID NO: 54956 - DNA, 20 bp, Artificial Sequence
  chemically synthesized
acataaagagcttttgctgg

SEQ ID NO: 54957 - DNA, 20 bp, Artificial Sequence
  chemically synthesized
ctggtggcagaactgtgaac

SEQ ID NO: 54958 - DNA, 20 bp, Artificial Sequence
  chemically synthesized
tggcagaactgtgaactgga

SEQ ID NO: 54959 - DNA, 20 bp, Artificial Sequence
  chemically synthesized
actgtgaactggatggattc

SEQ ID NO: 54960 - DNA, 20 bp, Artificial Sequence
  chemically synthesized
ctgtgaactggatggattct

SEQ ID NO: 54961 - DNA, 20 bp, Artificial Sequence
  chemically synthesized
aactggatggattctgggaa

SEQ ID NO: 54962 - DNA, 20 bp, Artificial Sequence
  chemically synthesized
gccagaaaaacaaatgcctg

SEQ ID NO: 54963 - DNA, 20 bp, Artificial Sequence
  chemically synthesized
gtgagcagtgcccacaccca

SEQ ID NO: 54964 - DNA, 20 bp, Artificial Sequence
  chemically synthesized
cccacacccatggtctagct

SEQ ID NO: 54965 - DNA, 20 bp, Artificial Sequence
  chemically synthesized
ccacacccatggtctagcta

SEQ ID NO: 54966 - DNA, 20 bp, Artificial Sequence
  chemically synthesized
gaaccaacctgtcattcaac

SEQ ID NO: 54967 - DNA, 20 bp, Artificial Sequence
  chemically synthesized
caacctgtcattcaactggt

SEQ ID NO: 54968 - DNA, 20 bp, Artificial Sequence
  chemically synthesized
taagtaaagaaagtgctatt

SEQ ID NO: 54969 - DNA, 20 bp, Artificial Sequence
  chemically synthesized
agtgctattcggacagccct

SEQ ID NO: 54970 - DNA, 20 bp, Artificial Sequence
  chemically synthesized
ttcggacagcccttggtctc

SEQ ID NO: 54971 - DNA, 20 bp, Artificial Sequence
  chemically synthesized
tcggacagcccttggtctct

SEQ ID NO: 54972 - DNA, 20 bp, Artificial Sequence
  chemically synthesized
tggtctctgggacaatcaac

SEQ ID NO: 54973 - DNA, 20 bp, Artificial Sequence
  chemically synthesized
ggtctctgggacaatcaact

SEQ ID NO: 54974 - DNA, 20 bp, Artificial Sequence
  chemically synthesized
ctgtctccagtgtaaagcct

SEQ ID NO: 54975 - DNA, 20 bp, Artificial Sequence
  chemically synthesized
actgatgaaccaaaaataca

SEQ ID NO: 54976 - DNA, 20 bp, Artificial Sequence
  chemically synthesized
aaatacatggaagcagtcct

SEQ ID NO: 54977 - DNA, 20 bp, Artificial Sequence
  chemically synthesized
acacttgagcactctgagaa

SEQ ID NO: 54978 - DNA, 20 bp, Artificial Sequence
  chemically synthesized
tgcttactccagattttctc

SEQ ID NO: 54979 - DNA, 20 bp, Artificial Sequence
  chemically synthesized
cagattttctcaggtcccag

SEQ ID NO: 54980 - DNA, 20 bp, Artificial Sequence
  chemically synthesized
agattttctcaggtcccagt

SEQ ID NO: 54981 - DNA, 20 bp, Artificial Sequence
  chemically synthesized
caaaatgtagatttcattat

SEQ ID NO: 54982 - DNA, 20 bp, Artificial Sequence
  chemically synthesized
aaaatgtagatttcattata

SEQ ID NO: 54983 - DNA, 20 bp, Artificial Sequence
  chemically synthesized
tagcaaaaaaaaaaaaaatc

SEQ ID NO: 54984 - DNA, 20 bp, Artificial Sequence
  chemically synthesized
gcagtatgtacaacattcac

SEQ ID NO: 54985 - DNA, 20 bp, Artificial Sequence
  chemically synthesized
cacaggaagtttcaccaaat

SEQ ID NO: 54986 - DNA, 20 bp, Artificial Sequence
  chemically synthesized
cagtcagtagcttaagacaa

SEQ ID NO: 54987 - DNA, 20 bp, Artificial Sequence
  chemically synthesized
taatcagtgccacttttaat

SEQ ID NO: 54988 - DNA, 20 bp, Artificial Sequence
  chemically synthesized
aatcagtgccacttttaatt

SEQ ID NO: 54989 - DNA, 20 bp, Artificial Sequence
  chemically synthesized
tttaattgggatgccttttt

SEQ ID NO: 54990 - DNA, 20 bp, Artificial Sequence
  chemically synthesized
ttgggatgcctttttaggca

SEQ ID NO: 54991 - DNA, 20 bp, Artificial Sequence
  chemically synthesized
tgggatgcctttttaggcaa

SEQ ID NO: 54992 - DNA, 20 bp, Artificial Sequence
  chemically synthesized
tttaagacaaaaaaaatact

SEQ ID NO: 54993 - DNA, 20 bp, Artificial Sequence
  chemically synthesized
ttaagacaaaaaaaatacta

SEQ ID NO: 54994 - DNA, 20 bp, Artificial Sequence
  chemically synthesized
agacaaaaaaaatactaggg

SEQ ID NO: 54995 - DNA, 20 bp, Artificial Sequence
  chemically synthesized
gacaaaaaaaatactaggga

SEQ ID NO: 54996 - DNA, 20 bp, Artificial Sequence
  chemically synthesized
ataaagtgaaaagtgagatt

SEQ ID NO: 54997 - DNA, 20 bp, Artificial Sequence
  chemically synthesized
aaaagtgagattaggtagca

SEQ ID NO: 54998 - DNA, 20 bp, Artificial Sequence
  chemically synthesized
aaagtgagattaggtagcat

SEQ ID NO: 54999 - DNA, 20 bp, Artificial Sequence
  chemically synthesized
aagtgagattaggtagcatg

SEQ ID NO: 55000 - DNA, 20 bp, Artificial Sequence
  chemically synthesized
attaggtagcatggggataa

SEQ ID NO: 55001 - DNA, 20 bp, Artificial Sequence
  chemically synthesized
aagaatgtgttcaatgcctc

SEQ ID NO: 55002 - DNA, 20 bp, Artificial Sequence
  chemically synthesized
ttctttaactcagaaatatt

SEQ ID NO: 55003 - DNA, 20 bp, Artificial Sequence
  chemically synthesized
tttaactcagaaatatttgg

SEQ ID NO: 55004 - DNA, 20 bp, Artificial Sequence
  chemically synthesized
aggttacttactcattatga

SEQ ID NO: 55005 - DNA, 20 bp, Artificial Sequence
  chemically synthesized
gatggattttttttttctat

SEQ ID NO: 55006 - DNA, 20 bp, Artificial Sequence
  chemically synthesized
ttttgttttttgttttttgt

SEQ ID NO: 55007 - DNA, 20 bp, Artificial Sequence
  chemically synthesized
gttttttgttttttgttggt

SEQ ID NO: 55008 - DNA, 20 bp, Artificial Sequence
  chemically synthesized
tttgttttttgttggttggt

SEQ ID NO: 55009 - DNA, 20 bp, Artificial Sequence
  chemically synthesized
atttttcttgtctttgccct

SEQ ID NO: 55010 - DNA, 20 bp, Artificial Sequence
  chemically synthesized
tttttcttgtctttgccctt

SEQ ID NO: 55011 - DNA, 20 bp, Artificial Sequence
  chemically synthesized
cagagtctgctattttatta

SEQ ID NO: 55012 - DNA, 20 bp, Artificial Sequence
  chemically synthesized
aggtcatgccatatttcaaa

SEQ ID NO: 55013 - DNA, 20 bp, Artificial Sequence
  chemically synthesized
ctgcatgtttgttcctcccc

SEQ ID NO: 55014 - DNA, 20 bp, Artificial Sequence
  chemically synthesized
ttgttcctccccaggagact

SEQ ID NO: 55015 - DNA, 20 bp, Artificial Sequence
  chemically synthesized
agacttggaagatgcagaac

SEQ ID NO: 55016 - DNA, 20 bp, Artificial Sequence
  chemically synthesized
attctcatgctatagccagt

SEQ ID NO: 55017 - DNA, 20 bp, Artificial Sequence
  chemically synthesized
tatagccagttggaagtgaa

SEQ ID NO: 55018 - DNA, 20 bp, Artificial Sequence
  chemically synthesized
ctcactgacctgtgcttttg

SEQ ID NO: 55019 - DNA, 20 bp, Artificial Sequence
  chemically synthesized
agatgtcaacatcaccaatc

SEQ ID NO: 55020 - DNA, 20 bp, Artificial Sequence
  chemically synthesized
ccaatctggaatttgaaata

SEQ ID NO: 55021 - DNA, 20 bp, Artificial Sequence
  chemically synthesized
ctggaatttgaaatatggtg

SEQ ID NO: 55022 - DNA, 20 bp, Artificial Sequence
  chemically synthesized
tggaatttgaaatatggtga

SEQ ID NO: 55023 - DNA, 20 bp, Artificial Sequence
  chemically synthesized
atttgaaatatggtgaggga

SEQ ID NO: 55024 - DNA, 20 bp, Artificial Sequence
  chemically synthesized
tgaaatatggtgagggatgg

SEQ ID NO: 55025 - DNA, 20 bp, Artificial Sequence
  chemically synthesized
gtgagggatggtggttttaa

SEQ ID NO: 55026 - DNA, 20 bp, Artificial Sequence
  chemically synthesized
gccacaaaagaaagaatatg

SEQ ID NO: 55027 - DNA, 20 bp, Artificial Sequence
  chemically synthesized
ttaacaaatgttaacatcta

SEQ ID NO: 55028 - DNA, 20 bp, Artificial Sequence
  chemically synthesized
aacatctaaggaattcccaa

SEQ ID NO: 55029 - DNA, 20 bp, Artificial Sequence
  chemically synthesized
ctcatacaaatctcctctca

SEQ ID NO: 55030 - DNA, 20 bp, Artificial Sequence
  chemically synthesized
gactcagtcaaatgatgctc

SEQ ID NO: 55031 - DNA, 20 bp, Artificial Sequence
  chemically synthesized
tcaaatgatgctctggatct

SEQ ID NO: 55032 - DNA, 20 bp, Artificial Sequence
  chemically synthesized
caaatgatgctctggatctt

SEQ ID NO: 55033 - DNA, 20 bp, Artificial Sequence
  chemically synthesized
aaatgatgctctggatcttg

SEQ ID NO: 55034 - DNA, 20 bp, Artificial Sequence
  chemically synthesized
aatgagataacctgcctcac

SEQ ID NO: 55035 - DNA, 20 bp, Artificial Sequence
  chemically synthesized
agataacctgcctcacagga

SEQ ID NO: 55036 - DNA, 20 bp, Artificial Sequence
  chemically synthesized
gcctcacaggaaggctgtga

SEQ ID NO: 55037 - DNA, 20 bp, Artificial Sequence
  chemically synthesized
tataaatcattccaaatagt

SEQ ID NO: 55038 - DNA, 20 bp, Artificial Sequence
  chemically synthesized
ggccagtgaataacgagtaa

SEQ ID NO: 55039 - DNA, 20 bp, Artificial Sequence
  chemically synthesized
gccagtgaataacgagtaat

SEQ ID NO: 55040 - DNA, 20 bp, Artificial Sequence
  chemically synthesized
ccagtgaataacgagtaatg

SEQ ID NO: 55041 - DNA, 20 bp, Artificial Sequence
  chemically synthesized
taaattttccaaaaatccac

SEQ ID NO: 55042 - DNA, 20 bp, Artificial Sequence
  chemically synthesized
aaaaatccacaggaataagt

SEQ ID NO: 55043 - DNA, 20 bp, Artificial Sequence
  chemically synthesized
agttggcattttgtttcaca

SEQ ID NO: 55044 - DNA, 20 bp, Artificial Sequence
  chemically synthesized
aggtctcacagaaaagacaa

SEQ ID NO: 55045 - DNA, 20 bp, Artificial Sequence
  chemically synthesized
aaagacaaaggaaaagagtc

SEQ ID NO: 55046 - DNA, 20 bp, Artificial Sequence
  chemically synthesized
ctggtttgaaagtttactaa

SEQ ID NO: 55047 - DNA, 20 bp, Artificial Sequence
  chemically synthesized
gaaagtttactaaaggtctc

SEQ ID NO: 55048 - DNA, 20 bp, Artificial Sequence
  chemically synthesized
aaagtttactaaaggtctca

SEQ ID NO: 55049 - DNA, 20 bp, Artificial Sequence
  chemically synthesized
taagtcatctcttgttgcca

SEQ ID NO: 55050 - DNA, 20 bp, Artificial Sequence
  chemically synthesized
aagtcatctcttgttgccaa

SEQ ID NO: 55051 - DNA, 20 bp, Artificial Sequence
  chemically synthesized
ttgccaagggttactatctc

SEQ ID NO: 55052 - DNA, 20 bp, Artificial Sequence
  chemically synthesized
tagcttgaaattctgacctg

SEQ ID NO: 55053 - DNA, 20 bp, Artificial Sequence
  chemically synthesized
gatccaccagtagtaataga

SEQ ID NO: 55054 - DNA, 20 bp, Artificial Sequence
  chemically synthesized
ttccagtttttgtcaattta

SEQ ID NO: 55055 - DNA, 20 bp, Artificial Sequence
  chemically synthesized
tccagtttttgtcaatttat

SEQ ID NO: 55056 - DNA, 20 bp, Artificial Sequence
  chemically synthesized
gagcttcctgcatctattta

SEQ ID NO: 55057 - DNA, 20 bp, Artificial Sequence
  chemically synthesized
tccttagataaacatgctgt

SEQ ID NO: 55058 - DNA, 20 bp, Artificial Sequence
  chemically synthesized
acttccctaacacattttcc

SEQ ID NO: 55059 - DNA, 20 bp, Artificial Sequence
  chemically synthesized
cagttcgatgtccacaatct

SEQ ID NO: 55060 - DNA, 20 bp, Artificial Sequence
  chemically synthesized
tcgatgtccacaatctaggc

SEQ ID NO: 55061 - DNA, 20 bp, Artificial Sequence
  chemically synthesized
tccacaatctaggctggaaa

SEQ ID NO: 55062 - DNA, 20 bp, Artificial Sequence
  chemically synthesized
cataacaactcattcaaaca

SEQ ID NO: 55063 - DNA, 20 bp, Artificial Sequence
  chemically synthesized
aaacaaggcactcattttca

SEQ ID NO: 55064 - DNA, 20 bp, Artificial Sequence
  chemically synthesized
aacaaggcactcattttcat

SEQ ID NO: 55065 - DNA, 20 bp, Artificial Sequence
  chemically synthesized
gggcaaatcactctcccaca

SEQ ID NO: 55066 - DNA, 20 bp, Artificial Sequence
  chemically synthesized
caaatcactctcccacacgg

SEQ ID NO: 55067 - DNA, 20 bp, Artificial Sequence
  chemically synthesized
cccacacggaggtttgactt

SEQ ID NO: 55068 - DNA, 20 bp, Artificial Sequence
  chemically synthesized
ctttggcttctttaaccagc

SEQ ID NO: 55069 - DNA, 20 bp, Artificial Sequence
  chemically synthesized
ggcttctttaaccagctggc

SEQ ID NO: 55070 - DNA, 20 bp, Artificial Sequence
  chemically synthesized
ttctttaaccagctggctgg

SEQ ID NO: 55071 - DNA, 20 bp, Artificial Sequence
  chemically synthesized
tctttaaccagctggctggt

SEQ ID NO: 55072 - DNA, 20 bp, Artificial Sequence
  chemically synthesized
ggtgggctgagtgttcatcc

SEQ ID NO: 55073 - DNA, 20 bp, Artificial Sequence
  chemically synthesized
gtgttcatcctggtttctct

SEQ ID NO: 55074 - DNA, 20 bp, Artificial Sequence
  chemically synthesized
ggtttctcttggccaagctg

SEQ ID NO: 55075 - DNA, 20 bp, Artificial Sequence
  chemically synthesized
tgtccagagcctcctctatt

SEQ ID NO: 55076 - DNA, 20 bp, Artificial Sequence
  chemically synthesized
gtccagagcctcctctattt

SEQ ID NO: 55077 - DNA, 20 bp, Artificial Sequence
  chemically synthesized
ctctatttgggttttccaat

SEQ ID NO: 55078 - DNA, 20 bp, Artificial Sequence
  chemically synthesized
ttggattcagatatttcagt

SEQ ID NO: 55079 - DNA, 20 bp, Artificial Sequence
  chemically synthesized
ttcagatatttcagttggaa

SEQ ID NO: 55080 - DNA, 20 bp, Artificial Sequence
  chemically synthesized
tcagatatttcagttggaaa

SEQ ID NO: 55081 - DNA, 20 bp, Artificial Sequence
  chemically synthesized
taagaaagaaacgttttcag

SEQ ID NO: 55082 - DNA, 20 bp, Artificial Sequence
  chemically synthesized
ctctttaatagatgaactcc

SEQ ID NO: 55083 - DNA, 20 bp, Artificial Sequence
  chemically synthesized
tggagttcagagcccttaaa

SEQ ID NO: 55084 - DNA, 20 bp, Artificial Sequence
  chemically synthesized
agtttcacaagacagccata

SEQ ID NO: 55085 - DNA, 20 bp, Artificial Sequence
  chemically synthesized
taatttcattctcaaaatca

SEQ ID NO: 55086 - DNA, 20 bp, Artificial Sequence
  chemically synthesized
aatttcattctcaaaatcat

SEQ ID NO: 55087 - DNA, 20 bp, Artificial Sequence
  chemically synthesized
cagtaccagaaacttgctac

SEQ ID NO: 55088 - DNA, 20 bp, Artificial Sequence
  chemically synthesized
accagaaacttgctacaggt

SEQ ID NO: 55089 - DNA, 20 bp, Artificial Sequence
  chemically synthesized
ccagaaacttgctacaggtt

SEQ ID NO: 55090 - DNA, 20 bp, Artificial Sequence
  chemically synthesized
cagaaacttgctacaggttg

SEQ ID NO: 55091 - DNA, 20 bp, Artificial Sequence
  chemically synthesized
tacaggttggggcctgtaat

SEQ ID NO: 55092 - DNA, 20 bp, Artificial Sequence
  chemically synthesized
gtttacctaaaattcagaaa

SEQ ID NO: 55093 - DNA, 20 bp, Artificial Sequence
  chemically synthesized
tttacctaaaattcagaaat

SEQ ID NO: 55094 - DNA, 20 bp, Artificial Sequence
  chemically synthesized
tttgtcctaagcttattccc

SEQ ID NO: 55095 - DNA, 20 bp, Artificial Sequence
  chemically synthesized
gtctagcttacccaaaaatt

SEQ ID NO: 55096 - DNA, 20 bp, Artificial Sequence
  chemically synthesized
atttttatcctgttccaagt

SEQ ID NO: 55097 - DNA, 20 bp, Artificial Sequence
  chemically synthesized
tttttatcctgttccaagtt

SEQ ID NO: 55098 - DNA, 20 bp, Artificial Sequence
  chemically synthesized
aaagcctatctaccccaaca

SEQ ID NO: 55099 - DNA, 20 bp, Artificial Sequence
  chemically synthesized
agttaacaaaagtaacgatt

SEQ ID NO: 55100 - DNA, 20 bp, Artificial Sequence
  chemically synthesized
gttaacaaaagtaacgattt

SEQ ID NO: 55101 - DNA, 20 bp, Artificial Sequence
  chemically synthesized
gatttgggagaacagtttta

SEQ ID NO: 55102 - DNA, 20 bp, Artificial Sequence
  chemically synthesized
tctctagttttcatgactgt

SEQ ID NO: 55103 - DNA, 20 bp, Artificial Sequence
  chemically synthesized
ctcagaccacaataaaccaa

SEQ ID NO: 55104 - DNA, 20 bp, Artificial Sequence
  chemically synthesized
aagattctgtaacaaaagct

SEQ ID NO: 55105 - DNA, 20 bp, Artificial Sequence
  chemically synthesized
agattctgtaacaaaagcta

SEQ ID NO: 55106 - DNA, 20 bp, Artificial Sequence
  chemically synthesized
ctcccctgcatttaacctcc

SEQ ID NO: 55107 - DNA, 20 bp, Artificial Sequence
  chemically synthesized
tcactcgaagccagacaaac

SEQ ID NO: 55108 - DNA, 20 bp, Artificial Sequence
  chemically synthesized
cctctttttgtgcagagtcc

SEQ ID NO: 55109 - DNA, 20 bp, Artificial Sequence
  chemically synthesized
gtccaggaaccattctcgaa

SEQ ID NO: 55110 - DNA, 20 bp, Artificial Sequence
  chemically synthesized
tacacacatccagttcacca

SEQ ID NO: 55111 - DNA, 20 bp, Artificial Sequence
  chemically synthesized
acacacatccagttcaccaa

SEQ ID NO: 55112 - DNA, 20 bp, Artificial Sequence
  chemically synthesized
agggaagccaacacacattg

SEQ ID NO: 55113 - DNA, 20 bp, Artificial Sequence
  chemically synthesized
gggaagccaacacacattgt

SEQ ID NO: 55114 - DNA, 20 bp, Artificial Sequence
  chemically synthesized
caacacacattgtgggttgt

SEQ ID NO: 55115 - DNA, 20 bp, Artificial Sequence
  chemically synthesized
tgtgggttgtaggtagtaaa

SEQ ID NO: 55116 - DNA, 20 bp, Artificial Sequence
  chemically synthesized
cttcctagaacacactcctt

SEQ ID NO: 55117 - DNA, 20 bp, Artificial Sequence
  chemically synthesized
ggatttaaacaaaattacat

SEQ ID NO: 55118 - DNA, 20 bp, Artificial Sequence
  chemically synthesized
aacaaaattacatcggttaa

SEQ ID NO: 55119 - DNA, 20 bp, Artificial Sequence
  chemically synthesized
atatacgcaaacttacccag

SEQ ID NO: 55120 - DNA, 20 bp, Artificial Sequence
  chemically synthesized
tatacctctttagagctatt

SEQ ID NO: 55121 - DNA, 20 bp, Artificial Sequence
  chemically synthesized
gctgagcttaaacagcacat

SEQ ID NO: 55122 - DNA, 20 bp, Artificial Sequence
  chemically synthesized
agcacataggaaaaacaaat

SEQ ID NO: 55123 - DNA, 20 bp, Artificial Sequence
  chemically synthesized
aactgtgtttatcacagaag

SEQ ID NO: 55124 - DNA, 20 bp, Artificial Sequence
  chemically synthesized
agaagaggaaaattaaattt

SEQ ID NO: 55125 - DNA, 20 bp, Artificial Sequence
  chemically synthesized
gaagaggaaaattaaattta

SEQ ID NO: 55126 - DNA, 20 bp, Artificial Sequence
  chemically synthesized
aggaaaattaaatttagggt

SEQ ID NO: 55127 - DNA, 20 bp, Artificial Sequence
  chemically synthesized
ggaaaattaaatttagggtt

SEQ ID NO: 55128 - DNA, 20 bp, Artificial Sequence
  chemically synthesized
attaaatttagggttgggaa

SEQ ID NO: 55129 - DNA, 20 bp, Artificial Sequence
  chemically synthesized
gtttgattacaatgcatttt

SEQ ID NO: 55130 - DNA, 20 bp, Artificial Sequence
  chemically synthesized
tttgattacaatgcatttta

SEQ ID NO: 55131 - DNA, 20 bp, Artificial Sequence
  chemically synthesized
ttgattacaatgcattttag

SEQ ID NO: 55132 - DNA, 20 bp, Artificial Sequence
  chemically synthesized
ttaggggtaaaatttatgtg

SEQ ID NO: 55133 - DNA, 20 bp, Artificial Sequence
  chemically synthesized
gcacaaaaattaagtgaatt

SEQ ID NO: 55134 - DNA, 20 bp, Artificial Sequence
  chemically synthesized
atgacctgtagccattccaa

SEQ ID NO: 55135 - DNA, 20 bp, Artificial Sequence
  chemically synthesized
gaacttatttttcccctaga

SEQ ID NO: 55136 - DNA, 20 bp, Artificial Sequence
  chemically synthesized
ccagtcaatcttcatacccc

SEQ ID NO: 55137 - DNA, 20 bp, Artificial Sequence
  chemically synthesized
ttctcaattctattaccctt

SEQ ID NO: 55138 - DNA, 20 bp, Artificial Sequence
  chemically synthesized
gtttgagactattatttttt

SEQ ID NO: 55139 - DNA, 20 bp, Artificial Sequence
  chemically synthesized
taggttgctgttcacattct

SEQ ID NO: 55140 - DNA, 20 bp, Artificial Sequence
  chemically synthesized
tatatatattttcatttttc

SEQ ID NO: 55141 - DNA, 20 bp, Artificial Sequence
  chemically synthesized
atatatattttcatttttct

SEQ ID NO: 55142 - DNA, 20 bp, Artificial Sequence
  chemically synthesized
tatatattttcatttttctg

SEQ ID NO: 55143 - DNA, 20 bp, Artificial Sequence
  chemically synthesized
tggggtataaaacctcagaa

SEQ ID NO: 55144 - DNA, 20 bp, Artificial Sequence
  chemically synthesized
aatggaattgctgtgtcata

SEQ ID NO: 55145 - DNA, 20 bp, Artificial Sequence
  chemically synthesized
cgcccaacagtttttcaaag

SEQ ID NO: 55146 - DNA, 20 bp, Artificial Sequence
  chemically synthesized
tcatttgcaacgtttgactt

SEQ ID NO: 55147 - DNA, 20 bp, Artificial Sequence
  chemically synthesized
catttgcaacgtttgacttt

SEQ ID NO: 55148 - DNA, 20 bp, Artificial Sequence
  chemically synthesized
ctttgggatagtatctcgtt

SEQ ID NO: 55149 - DNA, 20 bp, Artificial Sequence
  chemically synthesized
tgagcagcttttcatatact

SEQ ID NO: 55150 - DNA, 20 bp, Artificial Sequence
  chemically synthesized
ggtcttttgcctgtcttctt

SEQ ID NO: 55151 - DNA, 20 bp, Artificial Sequence
  chemically synthesized
gtcttttgcctgtcttcttt

SEQ ID NO: 55152 - DNA, 20 bp, Artificial Sequence
  chemically synthesized
atttgtccttttgttattgc

SEQ ID NO: 55153 - DNA, 20 bp, Artificial Sequence
  chemically synthesized
ttgccattttattttcttac

SEQ ID NO: 55154 - DNA, 20 bp, Artificial Sequence
  chemically synthesized
agagtttttttttattttga

SEQ ID NO: 55155 - DNA, 20 bp, Artificial Sequence
  chemically synthesized
actttgcctactcccaaagt

SEQ ID NO: 55156 - DNA, 20 bp, Artificial Sequence
  chemically synthesized
ctttgcctactcccaaagtt

SEQ ID NO: 55157 - DNA, 20 bp, Artificial Sequence
  chemically synthesized
attattatactttaagttct

SEQ ID NO: 55158 - DNA, 20 bp, Artificial Sequence
  chemically synthesized
ttattatactttaagttcta

SEQ ID NO: 55159 - DNA, 20 bp, Artificial Sequence
  chemically synthesized
ggtacatgtgcacaacgtgt

SEQ ID NO: 55160 - DNA, 20 bp, Artificial Sequence
  chemically synthesized
tatgtatacatgtgccatgt

SEQ ID NO: 55161 - DNA, 20 bp, Artificial Sequence
  chemically synthesized
attaactcgtcatttacatt

SEQ ID NO: 55162 - DNA, 20 bp, Artificial Sequence
  chemically synthesized
cccctccttccacctatgac

SEQ ID NO: 55163 - DNA, 20 bp, Artificial Sequence
  chemically synthesized
cttccacctatgactggccc

SEQ ID NO: 55164 - DNA, 20 bp, Artificial Sequence
  chemically synthesized
tgatagtttgctgagaatga

SEQ ID NO: 55165 - DNA, 20 bp, Artificial Sequence
  chemically synthesized
cttcatccatgtccctataa

SEQ ID NO: 55166 - DNA, 20 bp, Artificial Sequence
  chemically synthesized
catgaactcatcctttttta

SEQ ID NO: 55167 - DNA, 20 bp, Artificial Sequence
  chemically synthesized
tatggctgcatagtattcca

SEQ ID NO: 55168 - DNA, 20 bp, Artificial Sequence
  chemically synthesized
ttaatccagtctatcattga

SEQ ID NO: 55169 - DNA, 20 bp, Artificial Sequence
  chemically synthesized
gtctatcattgatggacatt

SEQ ID NO: 55170 - DNA, 20 bp, Artificial Sequence
  chemically synthesized
tcattgatggacatttggct

SEQ ID NO: 55171 - DNA, 20 bp, Artificial Sequence
  chemically synthesized
cagcatgatttatactcctt

SEQ ID NO: 55172 - DNA, 20 bp, Artificial Sequence
  chemically synthesized
agcatgatttatactccttt

SEQ ID NO: 55173 - DNA, 20 bp, Artificial Sequence
  chemically synthesized
tttgggtatatacccagtaa

SEQ ID NO: 55174 - DNA, 20 bp, Artificial Sequence
  chemically synthesized
ttgggtatatacccagtaat

SEQ ID NO: 55175 - DNA, 20 bp, Artificial Sequence
  chemically synthesized
gtatatacccagtaatggga

SEQ ID NO: 55176 - DNA, 20 bp, Artificial Sequence
  chemically synthesized
atacccagtaatgggatggc

SEQ ID NO: 55177 - DNA, 20 bp, Artificial Sequence
  chemically synthesized
tacccagtaatgggatggct

SEQ ID NO: 55178 - DNA, 20 bp, Artificial Sequence
  chemically synthesized
tcaaatagtatttctagctc

SEQ ID NO: 55179 - DNA, 20 bp, Artificial Sequence
  chemically synthesized
tttctagctctggatccttg

SEQ ID NO: 55180 - DNA, 20 bp, Artificial Sequence
  chemically synthesized
cgccacactgtcttccacaa

SEQ ID NO: 55181 - DNA, 20 bp, Artificial Sequence
  chemically synthesized
ttaatgatcaccattctaac

SEQ ID NO: 55182 - DNA, 20 bp, Artificial Sequence
  chemically synthesized
ccattctaactggtgtgaga

SEQ ID NO: 55183 - DNA, 20 bp, Artificial Sequence
  chemically synthesized
tgtgagatggtatgtcattg

SEQ ID NO: 55184 - DNA, 20 bp, Artificial Sequence
  chemically synthesized
tttgatttgcatttctctga

SEQ ID NO: 55185 - DNA, 20 bp, Artificial Sequence
  chemically synthesized
atttctctgatggccattga

SEQ ID NO: 55186 - DNA, 20 bp, Artificial Sequence
  chemically synthesized
caaacaaccccatcaaaaag

SEQ ID NO: 55187 - DNA, 20 bp, Artificial Sequence
  chemically synthesized
aaacaaccccatcaaaaagt

SEQ ID NO: 55188 - DNA, 20 bp, Artificial Sequence
  chemically synthesized
ccccatcaaaaagtgggcaa

SEQ ID NO: 55189 - DNA, 20 bp, Artificial Sequence
  chemically synthesized
gaaaaaatgctcatcatcaa

SEQ ID NO: 55190 - DNA, 20 bp, Artificial Sequence
  chemically synthesized
gtttctcttgtcttatgcat

SEQ ID NO: 55191 - DNA, 20 bp, Artificial Sequence
  chemically synthesized
tgtacaccactgaatagaaa

SEQ ID NO: 55192 - DNA, 20 bp, Artificial Sequence
  chemically synthesized
ctgaatagaaatggtgaaag

SEQ ID NO: 55193 - DNA, 20 bp, Artificial Sequence
  chemically synthesized
tggatattcctgtcgtgtcc

SEQ ID NO: 55194 - DNA, 20 bp, Artificial Sequence
  chemically synthesized
tcctgtcgtgtcctggtctt

SEQ ID NO: 55195 - DNA, 20 bp, Artificial Sequence
  chemically synthesized
cctgtcgtgtcctggtctta

SEQ ID NO: 55196 - DNA, 20 bp, Artificial Sequence
  chemically synthesized
ctaaatatgatattaactat

SEQ ID NO: 55197 - DNA, 20 bp, Artificial Sequence
  chemically synthesized
aaatgctctttatcagattg

SEQ ID NO: 55198 - DNA, 20 bp, Artificial Sequence
  chemically synthesized
tgcattgattgattataacc

SEQ ID NO: 55199 - DNA, 20 bp, Artificial Sequence
  chemically synthesized
tgtcttctagtctgttaaca

SEQ ID NO: 55200 - DNA, 20 bp, Artificial Sequence
  chemically synthesized
tttgaatctttaacctgctt

SEQ ID NO: 55201 - DNA, 20 bp, Artificial Sequence
  chemically synthesized
agtttgcttatacatttttg

SEQ ID NO: 55202 - DNA, 20 bp, Artificial Sequence
  chemically synthesized
gtttgcttatacatttttga

SEQ ID NO: 55203 - DNA, 20 bp, Artificial Sequence
  chemically synthesized
acttcttttctctaatattt

SEQ ID NO: 55204 - DNA, 20 bp, Artificial Sequence
  chemically synthesized
ttttctctaatattttggcc

SEQ ID NO: 55205 - DNA, 20 bp, Artificial Sequence
  chemically synthesized
tctaatattttggccaggtt

SEQ ID NO: 55206 - DNA, 20 bp, Artificial Sequence
  chemically synthesized
ctaatattttggccaggttt

SEQ ID NO: 55207 - DNA, 20 bp, Artificial Sequence
  chemically synthesized
tttggccaggtttgggtacc

SEQ ID NO: 55208 - DNA, 20 bp, Artificial Sequence
  chemically synthesized
ttaagctagcttcaaaaaat

SEQ ID NO: 55209 - DNA, 20 bp, Artificial Sequence
  chemically synthesized
cttcaaaaaataggttgaga

SEQ ID NO: 55210 - DNA, 20 bp, Artificial Sequence
  chemically synthesized
ttcaaaaaataggttgagaa

SEQ ID NO: 55211 - DNA, 20 bp, Artificial Sequence
  chemically synthesized
atcaagcatagagttttctt

SEQ ID NO: 55212 - DNA, 20 bp, Artificial Sequence
  chemically synthesized
tcaagcatagagttttcttt

SEQ ID NO: 55213 - DNA, 20 bp, Artificial Sequence
  chemically synthesized
caagcatagagttttctttg

SEQ ID NO: 55214 - DNA, 20 bp, Artificial Sequence
  chemically synthesized
aagcatagagttttctttgg

SEQ ID NO: 55215 - DNA, 20 bp, Artificial Sequence
  chemically synthesized
agcatagagttttctttggg

SEQ ID NO: 55216 - DNA, 20 bp, Artificial Sequence
  chemically synthesized
tgaaatattccatttctatg

SEQ ID NO: 55217 - DNA, 20 bp, Artificial Sequence
  chemically synthesized
gaaatattccatttctatgt

SEQ ID NO: 55218 - DNA, 20 bp, Artificial Sequence
  chemically synthesized
ttttcttaaccactcttgtt

SEQ ID NO: 55219 - DNA, 20 bp, Artificial Sequence
  chemically synthesized
tttcttaaccactcttgtta

SEQ ID NO: 55220 - DNA, 20 bp, Artificial Sequence
  chemically synthesized
atttcttacatatattccta

SEQ ID NO: 55221 - DNA, 20 bp, Artificial Sequence
  chemically synthesized
aaatatgtcttgactatttc

SEQ ID NO: 55222 - DNA, 20 bp, Artificial Sequence
  chemically synthesized
gatactattccactgcatac

SEQ ID NO: 55223 - DNA, 20 bp, Artificial Sequence
  chemically synthesized
tcccctttttattcctacag

SEQ ID NO: 55224 - DNA, 20 bp, Artificial Sequence
  chemically synthesized
cccctttttattcctacagt

SEQ ID NO: 55225 - DNA, 20 bp, Artificial Sequence
  chemically synthesized
ccctttttattcctacagtg

SEQ ID NO: 55226 - DNA, 20 bp, Artificial Sequence
  chemically synthesized
ttcctacagtggggccctcg

SEQ ID NO: 55227 - DNA, 20 bp, Artificial Sequence
  chemically synthesized
ctacagtggggccctcgtgg

SEQ ID NO: 55228 - DNA, 20 bp, Artificial Sequence
  chemically synthesized
aggtaaagtgcctgaatttc

SEQ ID NO: 55229 - DNA, 20 bp, Artificial Sequence
  chemically synthesized
acaaagaaattcttactgat

SEQ ID NO: 55230 - DNA, 20 bp, Artificial Sequence
  chemically synthesized
aaagagcaatatatgtgtga

SEQ ID NO: 55231 - DNA, 20 bp, Artificial Sequence
  chemically synthesized
agcaatatatgtgtgaaggt

SEQ ID NO: 55232 - DNA, 20 bp, Artificial Sequence
  chemically synthesized
aaaatagacctaaccactat

SEQ ID NO: 55233 - DNA, 20 bp, Artificial Sequence
  chemically synthesized
agaagttgtatataaaagta

SEQ ID NO: 55234 - DNA, 20 bp, Artificial Sequence
  chemically synthesized
aaaagtatggttgtcacttt

SEQ ID NO: 55235 - DNA, 20 bp, Artificial Sequence
  chemically synthesized
aaagtatggttgtcactttt

SEQ ID NO: 55236 - DNA, 20 bp, Artificial Sequence
  chemically synthesized
ctacctgaaaacactgtgtc

SEQ ID NO: 55237 - DNA, 20 bp, Artificial Sequence
  chemically synthesized
actgtgtctggacattctgt

SEQ ID NO: 55238 - DNA, 20 bp, Artificial Sequence
  chemically synthesized
ggttaaaagtagacaaatag

SEQ ID NO: 55239 - DNA, 20 bp, Artificial Sequence
  chemically synthesized
agacaaatagtggaaacaac

SEQ ID NO: 55240 - DNA, 20 bp, Artificial Sequence
  chemically synthesized
cctgcagtgaaagaattctg

SEQ ID NO: 55241 - DNA, 20 bp, Artificial Sequence
  chemically synthesized
ttctgaggatcttcaaaccc

SEQ ID NO: 55242 - DNA, 20 bp, Artificial Sequence
  chemically synthesized
ttgtgcaaacctacatgaag

SEQ ID NO: 55243 - DNA, 20 bp, Artificial Sequence
  chemically synthesized
acctacatgaagtggctaac

SEQ ID NO: 55244 - DNA, 20 bp, Artificial Sequence
  chemically synthesized
atgaagtggctaactggagc

SEQ ID NO: 55245 - DNA, 20 bp, Artificial Sequence
  chemically synthesized
tgaagtggctaactggagct

SEQ ID NO: 55246 - DNA, 20 bp, Artificial Sequence
  chemically synthesized
ggcttcctgtcatccatcac

SEQ ID NO: 55247 - DNA, 20 bp, Artificial Sequence
  chemically synthesized
tccttctcccaaattccttg

SEQ ID NO: 55248 - DNA, 20 bp, Artificial Sequence
  chemically synthesized
gagttttctacaaaaaaaaa

SEQ ID NO: 55249 - DNA, 20 bp, Artificial Sequence
  chemically synthesized
agttttctacaaaaaaaaaa

SEQ ID NO: 55250 - DNA, 20 bp, Artificial Sequence
  chemically synthesized
aaaaaaaaaagggaatcaat

SEQ ID NO: 55251 - DNA, 20 bp, Artificial Sequence
  chemically synthesized
aaaaaaagggaatcaatagg

SEQ ID NO: 55252 - DNA, 20 bp, Artificial Sequence
  chemically synthesized
tagatagatagatcattgat

SEQ ID NO: 55253 - DNA, 20 bp, Artificial Sequence
  chemically synthesized
tattaagaaattgacttttg

SEQ ID NO: 55254 - DNA, 20 bp, Artificial Sequence
  chemically synthesized
gaaattgacttttgtggttg

SEQ ID NO: 55255 - DNA, 20 bp, Artificial Sequence
  chemically synthesized
aaattgacttttgtggttgt

SEQ ID NO: 55256 - DNA, 20 bp, Artificial Sequence
  chemically synthesized
acttttgtggttgtgggaac

SEQ ID NO: 55257 - DNA, 20 bp, Artificial Sequence
  chemically synthesized
ggcaatcgcaaaaatccata

SEQ ID NO: 55258 - DNA, 20 bp, Artificial Sequence
  chemically synthesized
aatccataaggcaagccagt

SEQ ID NO: 55259 - DNA, 20 bp, Artificial Sequence
  chemically synthesized
agccagtaggctagaaattc

SEQ ID NO: 55260 - DNA, 20 bp, Artificial Sequence
  chemically synthesized
gtattgagcctaaattccgc

SEQ ID NO: 55261 - DNA, 20 bp, Artificial Sequence
  chemically synthesized
tattgagcctaaattccgca

SEQ ID NO: 55262 - DNA, 20 bp, Artificial Sequence
  chemically synthesized
gacagacttgcttcttcttc

SEQ ID NO: 55263 - DNA, 20 bp, Artificial Sequence
  chemically synthesized
acagacttgcttcttcttca

SEQ ID NO: 55264 - DNA, 20 bp, Artificial Sequence
  chemically synthesized
aacctctgtctttgctctag

SEQ ID NO: 55265 - DNA, 20 bp, Artificial Sequence
  chemically synthesized
ctagaggccttctactgatg

SEQ ID NO: 55266 - DNA, 20 bp, Artificial Sequence
  chemically synthesized
aggtgatgcccaccacatca

SEQ ID NO: 55267 - DNA, 20 bp, Artificial Sequence
  chemically synthesized
gatgcccaccacatcacgga

SEQ ID NO: 55268 - DNA, 20 bp, Artificial Sequence
  chemically synthesized
accctcaaaaagaaaattaa

SEQ ID NO: 55269 - DNA, 20 bp, Artificial Sequence
  chemically synthesized
actaagatgataaaatagag

SEQ ID NO: 55270 - DNA, 20 bp, Artificial Sequence
  chemically synthesized
tgaacaattaacttgtgaaa

SEQ ID NO: 55271 - DNA, 20 bp, Artificial Sequence
  chemically synthesized
tgtagtagaaaagagacatt

SEQ ID NO: 55272 - DNA, 20 bp, Artificial Sequence
  chemically synthesized
gaaaagagacattaggcaga

SEQ ID NO: 55273 - DNA, 20 bp, Artificial Sequence
  chemically synthesized
aggcagatggctgtgcatgt

SEQ ID NO: 55274 - DNA, 20 bp, Artificial Sequence
  chemically synthesized
tggccacacagaagcagcat

SEQ ID NO: 55275 - DNA, 20 bp, Artificial Sequence
  chemically synthesized
agcattggccatgaccagtg

SEQ ID NO: 55276 - DNA, 20 bp, Artificial Sequence
  chemically synthesized
gcattggccatgaccagtgt

SEQ ID NO: 55277 - DNA, 20 bp, Artificial Sequence
  chemically synthesized
gccatgaccagtgtgggtcc

SEQ ID NO: 55278 - DNA, 20 bp, Artificial Sequence
  chemically synthesized
gaccagtgtgggtcctggtt

SEQ ID NO: 55279 - DNA, 20 bp, Artificial Sequence
  chemically synthesized
accagtgtgggtcctggtta

SEQ ID NO: 55280 - DNA, 20 bp, Artificial Sequence
  chemically synthesized
ccagtgtgggtcctggttag

SEQ ID NO: 55281 - DNA, 20 bp, Artificial Sequence
  chemically synthesized
cctggttaggggaagagaac

SEQ ID NO: 55282 - DNA, 20 bp, Artificial Sequence
  chemically synthesized
gaactggctttgacaacaac

SEQ ID NO: 55283 - DNA, 20 bp, Artificial Sequence
  chemically synthesized
aactggctttgacaacaaca

SEQ ID NO: 55284 - DNA, 20 bp, Artificial Sequence
  chemically synthesized
acaacaacagggtatctctg

SEQ ID NO: 55285 - DNA, 20 bp, Artificial Sequence
  chemically synthesized
tctctgaggttataaaaagt

SEQ ID NO: 55286 - DNA, 20 bp, Artificial Sequence
  chemically synthesized
ctctgaggttataaaaagtt

SEQ ID NO: 55287 - DNA, 20 bp, Artificial Sequence
  chemically synthesized
aaagttgggttctgatcatt

SEQ ID NO: 55288 - DNA, 20 bp, Artificial Sequence
  chemically synthesized
gttctgatcatttggagatg

SEQ ID NO: 55289 - DNA, 20 bp, Artificial Sequence
  chemically synthesized
atttggagatgaggtcccta

SEQ ID NO: 55290 - DNA, 20 bp, Artificial Sequence
  chemically synthesized
gagatgaggtccctatggat

SEQ ID NO: 55291 - DNA, 20 bp, Artificial Sequence
  chemically synthesized
agatgaggtccctatggata

SEQ ID NO: 55292 - DNA, 20 bp, Artificial Sequence
  chemically synthesized
ggatagggcaccatatctaa

SEQ ID NO: 55293 - DNA, 20 bp, Artificial Sequence
  chemically synthesized
tctctgagagtgagcagaga

SEQ ID NO: 55294 - DNA, 20 bp, Artificial Sequence
  chemically synthesized
agagtgagcagagaaggcag

SEQ ID NO: 55295 - DNA, 20 bp, Artificial Sequence
  chemically synthesized
aggttctcagtcttctgaca

SEQ ID NO: 55296 - DNA, 20 bp, Artificial Sequence
  chemically synthesized
tcagtcttctgacaaggtcc

SEQ ID NO: 55297 - DNA, 20 bp, Artificial Sequence
  chemically synthesized
tgacaaggtcctggagcatc

SEQ ID NO: 55298 - DNA, 20 bp, Artificial Sequence
  chemically synthesized
gacaaggtcctggagcatca

SEQ ID NO: 55299 - DNA, 20 bp, Artificial Sequence
  chemically synthesized
acaaggtcctggagcatcag

SEQ ID NO: 55300 - DNA, 20 bp, Artificial Sequence
  chemically synthesized
acaacacaccaagagcctcc

SEQ ID NO: 55301 - DNA, 20 bp, Artificial Sequence
  chemically synthesized
tctgacatgcctcctccgaa

SEQ ID NO: 55302 - DNA, 20 bp, Artificial Sequence
  chemically synthesized
catgcctcctccgaacggca

SEQ ID NO: 55303 - DNA, 20 bp, Artificial Sequence
  chemically synthesized
atgcctcctccgaacggcaa

SEQ ID NO: 55304 - DNA, 20 bp, Artificial Sequence
  chemically synthesized
tgcctcctccgaacggcaag

SEQ ID NO: 55305 - DNA, 20 bp, Artificial Sequence
  chemically synthesized
gcctcctccgaacggcaagg

SEQ ID NO: 55306 - DNA, 20 bp, Artificial Sequence
  chemically synthesized
ctccgaacggcaagggggag

SEQ ID NO: 55307 - DNA, 20 bp, Artificial Sequence
  chemically synthesized
gcaagggggagaggtacgta

SEQ ID NO: 55308 - DNA, 20 bp, Artificial Sequence
  chemically synthesized
tatggtacacacactgctga

SEQ ID NO: 55309 - DNA, 20 bp, Artificial Sequence
  chemically synthesized
acacacactgctgatggcat

SEQ ID NO: 55310 - DNA, 20 bp, Artificial Sequence
  chemically synthesized
gctgatggcataggcccctt

SEQ ID NO: 55311 - DNA, 20 bp, Artificial Sequence
  chemically synthesized
atggcataggcccctttgga

SEQ ID NO: 55312 - DNA, 20 bp, Artificial Sequence
  chemically synthesized
tggcataggcccctttggaa

SEQ ID NO: 55313 - DNA, 20 bp, Artificial Sequence
  chemically synthesized
ggcataggcccctttggaag

SEQ ID NO: 55314 - DNA, 20 bp, Artificial Sequence
  chemically synthesized
aaggggtagtgtgagtctct

SEQ ID NO: 55315 - DNA, 20 bp, Artificial Sequence
  chemically synthesized
aggggtagtgtgagtctctt

SEQ ID NO: 55316 - DNA, 20 bp, Artificial Sequence
  chemically synthesized
ggggtagtgtgagtctcttg

SEQ ID NO: 55317 - DNA, 20 bp, Artificial Sequence
  chemically synthesized
gtgtgagtctcttggggcta

SEQ ID NO: 55318 - DNA, 20 bp, Artificial Sequence
  chemically synthesized
ggggctatggcaagcacccc

SEQ ID NO: 55319 - DNA, 20 bp, Artificial Sequence
  chemically synthesized
gcaagcacccctggacaagc

SEQ ID NO: 55320 - DNA, 20 bp, Artificial Sequence
  chemically synthesized
ccctggacaagcaggaagag

SEQ ID NO: 55321 - DNA, 20 bp, Artificial Sequence
  chemically synthesized
tggacaagcaggaagagagg

SEQ ID NO: 55322 - DNA, 20 bp, Artificial Sequence
  chemically synthesized
acaagcaggaagagaggtgg

SEQ ID NO: 55323 - DNA, 20 bp, Artificial Sequence
  chemically synthesized
agcaggaagagaggtggtgg

SEQ ID NO: 55324 - DNA, 20 bp, Artificial Sequence
  chemically synthesized
ggtggtggaggcatgtctca

SEQ ID NO: 55325 - DNA, 20 bp, Artificial Sequence
  chemically synthesized
tcacggtagcatctccttct

SEQ ID NO: 55326 - DNA, 20 bp, Artificial Sequence
  chemically synthesized
catctccttctaggtcctaa

SEQ ID NO: 55327 - DNA, 20 bp, Artificial Sequence
  chemically synthesized
atctccttctaggtcctaat

SEQ ID NO: 55328 - DNA, 20 bp, Artificial Sequence
  chemically synthesized
ctaatgggacacttcattaa

SEQ ID NO: 55329 - DNA, 20 bp, Artificial Sequence
  chemically synthesized
ccatttaagtgagtttaaac

SEQ ID NO: 55330 - DNA, 20 bp, Artificial Sequence
  chemically synthesized
aagcatcttccaacccagta

SEQ ID NO: 55331 - DNA, 20 bp, Artificial Sequence
  chemically synthesized
ccaacccagtaaggctgaag

SEQ ID NO: 55332 - DNA, 20 bp, Artificial Sequence
  chemically synthesized
caacccagtaaggctgaaga

SEQ ID NO: 55333 - DNA, 20 bp, Artificial Sequence
  chemically synthesized
aaagaaatcatttgagcttg

SEQ ID NO: 55334 - DNA, 20 bp, Artificial Sequence
  chemically synthesized
gcttgaggaaaactgtccag

SEQ ID NO: 55335 - DNA, 20 bp, Artificial Sequence
  chemically synthesized
cttgaggaaaactgtccaga

SEQ ID NO: 55336 - DNA, 20 bp, Artificial Sequence
  chemically synthesized
aaaactgtccagagggcacg

SEQ ID NO: 55337 - DNA, 20 bp, Artificial Sequence
  chemically synthesized
agccgttgtgatatgtaaca

SEQ ID NO: 55338 - DNA, 20 bp, Artificial Sequence
  chemically synthesized
gagcctcagaatcaaagaac

SEQ ID NO: 55339 - DNA, 20 bp, Artificial Sequence
  chemically synthesized
cagaatcaaagaactggatt

SEQ ID NO: 55340 - DNA, 20 bp, Artificial Sequence
  chemically synthesized
atccctttaaaccattttac

SEQ ID NO: 55341 - DNA, 20 bp, Artificial Sequence
  chemically synthesized
tccctttaaaccattttaca

SEQ ID NO: 55342 - DNA, 20 bp, Artificial Sequence
  chemically synthesized
ccctttaaaccattttacag

SEQ ID NO: 55343 - DNA, 20 bp, Artificial Sequence
  chemically synthesized
cagtttccttatcaatatgc

SEQ ID NO: 55344 - DNA, 20 bp, Artificial Sequence
  chemically synthesized
aagcaaagcatgcagtactt

SEQ ID NO: 55345 - DNA, 20 bp, Artificial Sequence
  chemically synthesized
attcctctattattaaaaga

SEQ ID NO: 55346 - DNA, 20 bp, Artificial Sequence
  chemically synthesized
ttcctctattattaaaagat

SEQ ID NO: 55347 - DNA, 20 bp, Artificial Sequence
  chemically synthesized
tattattaaaagatgggcac

SEQ ID NO: 55348 - DNA, 20 bp, Artificial Sequence
  chemically synthesized
attattaaaagatgggcaca

SEQ ID NO: 55349 - DNA, 20 bp, Artificial Sequence
  chemically synthesized
ttaaaagatgggcacagggc

SEQ ID NO: 55350 - DNA, 20 bp, Artificial Sequence
  chemically synthesized
taaaagatgggcacagggca

SEQ ID NO: 55351 - DNA, 20 bp, Artificial Sequence
  chemically synthesized
aaaagatgggcacagggcag

SEQ ID NO: 55352 - DNA, 20 bp, Artificial Sequence
  chemically synthesized
ggcaggggcttcagctcaga

SEQ ID NO: 55353 - DNA, 20 bp, Artificial Sequence
  chemically synthesized
tcagaaggccttgttgagaa

SEQ ID NO: 55354 - DNA, 20 bp, Artificial Sequence
  chemically synthesized
aggccttgttgagaatggaa

SEQ ID NO: 55355 - DNA, 20 bp, Artificial Sequence
  chemically synthesized
ttgagaatggaatggagagc

SEQ ID NO: 55356 - DNA, 20 bp, Artificial Sequence
  chemically synthesized
ggagagcaggaacaagagag

SEQ ID NO: 55357 - DNA, 20 bp, Artificial Sequence
  chemically synthesized
gagagcaggaacaagagaga

SEQ ID NO: 55358 - DNA, 20 bp, Artificial Sequence
  chemically synthesized
agagcaggaacaagagagag

SEQ ID NO: 55359 - DNA, 20 bp, Artificial Sequence
  chemically synthesized
ggaacaagagagaggggcaa

SEQ ID NO: 55360 - DNA, 20 bp, Artificial Sequence
  chemically synthesized
cattgccagcattctctgtt

SEQ ID NO: 55361 - DNA, 20 bp, Artificial Sequence
  chemically synthesized
tcctgcttccctctaagtcc

SEQ ID NO: 55362 - DNA, 20 bp, Artificial Sequence
  chemically synthesized
cctgcttccctctaagtcca

SEQ ID NO: 55363 - DNA, 20 bp, Artificial Sequence
  chemically synthesized
ccccttttacaacccatcca

SEQ ID NO: 55364 - DNA, 20 bp, Artificial Sequence
  chemically synthesized
cccttttacaacccatccaa

SEQ ID NO: 55365 - DNA, 20 bp, Artificial Sequence
  chemically synthesized
cttttttttcagtacctcta

SEQ ID NO: 55366 - DNA, 20 bp, Artificial Sequence
  chemically synthesized
taaggcaaagcagcagaaac

SEQ ID NO: 55367 - DNA, 20 bp, Artificial Sequence
  chemically synthesized
aagtgactacaacaagagct

SEQ ID NO: 55368 - DNA, 20 bp, Artificial Sequence
  chemically synthesized
ctaggccaaactctgccatg

SEQ ID NO: 55369 - DNA, 20 bp, Artificial Sequence
  chemically synthesized
taggccaaactctgccatgt

SEQ ID NO: 55370 - DNA, 20 bp, Artificial Sequence
  chemically synthesized
ccatgtgggctgcattttat

SEQ ID NO: 55371 - DNA, 20 bp, Artificial Sequence
  chemically synthesized
catgtgggctgcattttatt

SEQ ID NO: 55372 - DNA, 20 bp, Artificial Sequence
  chemically synthesized
tgggctgcattttattgggc

SEQ ID NO: 55373 - DNA, 20 bp, Artificial Sequence
  chemically synthesized
ccccagacaactaacttccc

SEQ ID NO: 55374 - DNA, 20 bp, Artificial Sequence
  chemically synthesized
gtgaccaacaagcagccaag

SEQ ID NO: 55375 - DNA, 20 bp, Artificial Sequence
  chemically synthesized
caacaagcagccaagaggcc

SEQ ID NO: 55376 - DNA, 20 bp, Artificial Sequence
  chemically synthesized
agcagccaagaggccaggac

SEQ ID NO: 55377 - DNA, 20 bp, Artificial Sequence
  chemically synthesized
gcagccaagaggccaggaca

SEQ ID NO: 55378 - DNA, 20 bp, Artificial Sequence
  chemically synthesized
ggccaggacagggaagtctc

SEQ ID NO: 55379 - DNA, 20 bp, Artificial Sequence
  chemically synthesized
ggaagtctcaggacctttct

SEQ ID NO: 55380 - DNA, 20 bp, Artificial Sequence
  chemically synthesized
aggaaatcaatacctttctc

SEQ ID NO: 55381 - DNA, 20 bp, Artificial Sequence
  chemically synthesized
ggaaatcaatacctttctct

SEQ ID NO: 55382 - DNA, 20 bp, Artificial Sequence
  chemically synthesized
ctccaacagcttagcatgtg

SEQ ID NO: 55383 - DNA, 20 bp, Artificial Sequence
  chemically synthesized
atactaacagcaaccctgca

SEQ ID NO: 55384 - DNA, 20 bp, Artificial Sequence
  chemically synthesized
taacagcaaccctgcaaggc

SEQ ID NO: 55385 - DNA, 20 bp, Artificial Sequence
  chemically synthesized
agcaaccctgcaaggcagga

SEQ ID NO: 55386 - DNA, 20 bp, Artificial Sequence
  chemically synthesized
ctgcaaggcaggaaggcagt

SEQ ID NO: 55387 - DNA, 20 bp, Artificial Sequence
  chemically synthesized
tgcaaggcaggaaggcagta

SEQ ID NO: 55388 - DNA, 20 bp, Artificial Sequence
  chemically synthesized
ggcaggaaggcagtagggag

SEQ ID NO: 55389 - DNA, 20 bp, Artificial Sequence
  chemically synthesized
gcagtagggagaggcccaag

SEQ ID NO: 55390 - DNA, 20 bp, Artificial Sequence
  chemically synthesized
ccaagaggaattcagcatta

SEQ ID NO: 55391 - DNA, 20 bp, Artificial Sequence
  chemically synthesized
taaggcagtgagactgacag

SEQ ID NO: 55392 - DNA, 20 bp, Artificial Sequence
  chemically synthesized
aaggcagtgagactgacaga

SEQ ID NO: 55393 - DNA, 20 bp, Artificial Sequence
  chemically synthesized
aggcagtgagactgacagag

SEQ ID NO: 55394 - DNA, 20 bp, Artificial Sequence
  chemically synthesized
ctgacagaggggaccccctg

SEQ ID NO: 55395 - DNA, 20 bp, Artificial Sequence
  chemically synthesized
gggaccccctgaggacattc

SEQ ID NO: 55396 - DNA, 20 bp, Artificial Sequence
  chemically synthesized
ccccctgaggacattctgga

SEQ ID NO: 55397 - DNA, 20 bp, Artificial Sequence
  chemically synthesized
cattctggaaggtcttagcc

SEQ ID NO: 55398 - DNA, 20 bp, Artificial Sequence
  chemically synthesized
attctggaaggtcttagcca

SEQ ID NO: 55399 - DNA, 20 bp, Artificial Sequence
  chemically synthesized
ggaaggtcttagccagggcc

SEQ ID NO: 55400 - DNA, 20 bp, Artificial Sequence
  chemically synthesized
atgtcactgtagctgagacg

SEQ ID NO: 55401 - DNA, 20 bp, Artificial Sequence
  chemically synthesized
tgtagctgagacgaggtgca

SEQ ID NO: 55402 - DNA, 20 bp, Artificial Sequence
  chemically synthesized
gagtttaaatactcctgctt

SEQ ID NO: 55403 - DNA, 20 bp, Artificial Sequence
  chemically synthesized
agtttaaatactcctgcttt

SEQ ID NO: 55404 - DNA, 20 bp, Artificial Sequence
  chemically synthesized
gtttaaatactcctgctttg

SEQ ID NO: 55405 - DNA, 20 bp, Artificial Sequence
  chemically synthesized
caagttctccaatattcaaa

SEQ ID NO: 55406 - DNA, 20 bp, Artificial Sequence
  chemically synthesized
ccaatattcaaaaggcaaag

SEQ ID NO: 55407 - DNA, 20 bp, Artificial Sequence
  chemically synthesized
tatgatatctcaaacaccgt

SEQ ID NO: 55408 - DNA, 20 bp, Artificial Sequence
  chemically synthesized
cactcacatcagagtcaaaa

SEQ ID NO: 55409 - DNA, 20 bp, Artificial Sequence
  chemically synthesized
ggatgtttctaacctgcagc

SEQ ID NO: 55410 - DNA, 20 bp, Artificial Sequence
  chemically synthesized
gatgtttctaacctgcagct

SEQ ID NO: 55411 - DNA, 20 bp, Artificial Sequence
  chemically synthesized
atgtttctaacctgcagctg

SEQ ID NO: 55412 - DNA, 20 bp, Artificial Sequence
  chemically synthesized
gggcttctcccagcagtatt

SEQ ID NO: 55413 - DNA, 20 bp, Artificial Sequence
  chemically synthesized
ggcttctcccagcagtatta

SEQ ID NO: 55414 - DNA, 20 bp, Artificial Sequence
  chemically synthesized
gcttctcccagcagtattag

SEQ ID NO: 55415 - DNA, 20 bp, Artificial Sequence
  chemically synthesized
taggggcactttccatcttg

SEQ ID NO: 55416 - DNA, 20 bp, Artificial Sequence
  chemically synthesized
ggctccaccgtctgtaatgc

SEQ ID NO: 55417 - DNA, 20 bp, Artificial Sequence
  chemically synthesized
ctgtaatgcaggactccaag

SEQ ID NO: 55418 - DNA, 20 bp, Artificial Sequence
  chemically synthesized
taatgcaggactccaagtgg

SEQ ID NO: 55419 - DNA, 20 bp, Artificial Sequence
  chemically synthesized
aggactccaagtggtggaag

SEQ ID NO: 55420 - DNA, 20 bp, Artificial Sequence
  chemically synthesized
ctccaagtggtggaagagga

SEQ ID NO: 55421 - DNA, 20 bp, Artificial Sequence
  chemically synthesized
ggtggaagaggacggagcag

SEQ ID NO: 55422 - DNA, 20 bp, Artificial Sequence
  chemically synthesized
cggagcagaggagtcacaca

SEQ ID NO: 55423 - DNA, 20 bp, Artificial Sequence
  chemically synthesized
ggagcagaggagtcacacat

SEQ ID NO: 55424 - DNA, 20 bp, Artificial Sequence
  chemically synthesized
gtcacacatgggtgtgtgtc

SEQ ID NO: 55425 - DNA, 20 bp, Artificial Sequence
  chemically synthesized
catgggtgtgtgtctggccc

SEQ ID NO: 55426 - DNA, 20 bp, Artificial Sequence
  chemically synthesized
atgggtgtgtgtctggccca

SEQ ID NO: 55427 - DNA, 20 bp, Artificial Sequence
  chemically synthesized
ggtgtgtgtctggcccaggg

SEQ ID NO: 55428 - DNA, 20 bp, Artificial Sequence
  chemically synthesized
tgtctggcccagggtggaag

SEQ ID NO: 55429 - DNA, 20 bp, Artificial Sequence
  chemically synthesized
ttctgcccacctcactcaca

SEQ ID NO: 55430 - DNA, 20 bp, Artificial Sequence
  chemically synthesized
gccacaccccactgcaagag

SEQ ID NO: 55431 - DNA, 20 bp, Artificial Sequence
  chemically synthesized
caccccactgcaagagaggc

SEQ ID NO: 55432 - DNA, 20 bp, Artificial Sequence
  chemically synthesized
gcaagagaggctggagaatg

SEQ ID NO: 55433 - DNA, 20 bp, Artificial Sequence
  chemically synthesized
agaggctggagaatgcggac

SEQ ID NO: 55434 - DNA, 20 bp, Artificial Sequence
  chemically synthesized
ttaaacccaagaagaagaaa

SEQ ID NO: 55435 - DNA, 20 bp, Artificial Sequence
  chemically synthesized
gaaatggttttctgaatagt

SEQ ID NO: 55436 - DNA, 20 bp, Artificial Sequence
  chemically synthesized
ggccatttactgacacaaaa

SEQ ID NO: 55437 - DNA, 20 bp, Artificial Sequence
  chemically synthesized
gccatttactgacacaaaaa

SEQ ID NO: 55438 - DNA, 20 bp, Artificial Sequence
  chemically synthesized
agggtcaaagtgacttgcag

SEQ ID NO: 55439 - DNA, 20 bp, Artificial Sequence
  chemically synthesized
aaatactataattatttcct

SEQ ID NO: 55440 - DNA, 20 bp, Artificial Sequence
  chemically synthesized
ttcttttccagttaaacctg

SEQ ID NO: 55441 - DNA, 20 bp, Artificial Sequence
  chemically synthesized
ttgacctgagtgtcgtctat

SEQ ID NO: 55442 - DNA, 20 bp, Artificial Sequence
  chemically synthesized
tgacctgagtgtcgtctatc

SEQ ID NO: 55443 - DNA, 20 bp, Artificial Sequence
  chemically synthesized
ctgagtgtcgtctatcggga

SEQ ID NO: 55444 - DNA, 20 bp, Artificial Sequence
  chemically synthesized
ggaaggagccaatgactttg

SEQ ID NO: 55445 - DNA, 20 bp, Artificial Sequence
  chemically synthesized
gcacgatgtagcttaccgcc

SEQ ID NO: 55446 - DNA, 20 bp, Artificial Sequence
  chemically synthesized
tgtagcttaccgccaggaaa

SEQ ID NO: 55447 - DNA, 20 bp, Artificial Sequence
  chemically synthesized
aggaaaaggatgaaaacaaa

SEQ ID NO: 55448 - DNA, 20 bp, Artificial Sequence
  chemically synthesized
aaaggatgaaaacaaatgga

SEQ ID NO: 55449 - DNA, 20 bp, Artificial Sequence
  chemically synthesized
atgaatgttttctattttgt

SEQ ID NO: 55450 - DNA, 20 bp, Artificial Sequence
  chemically synthesized
gcctagtagtgcatttcccc

SEQ ID NO: 55451 - DNA, 20 bp, Artificial Sequence
  chemically synthesized
cctagtagtgcatttcccct

SEQ ID NO: 55452 - DNA, 20 bp, Artificial Sequence
  chemically synthesized
agtagtgcatttcccctggg

SEQ ID NO: 55453 - DNA, 20 bp, Artificial Sequence
  chemically synthesized
gtagtgcatttcccctggga

SEQ ID NO: 55454 - DNA, 20 bp, Artificial Sequence
  chemically synthesized
ctgaaagaatctcccaatat

SEQ ID NO: 55455 - DNA, 20 bp, Artificial Sequence
  chemically synthesized
atattggccccatgaaaacc

SEQ ID NO: 55456 - DNA, 20 bp, Artificial Sequence
  chemically synthesized
gatgcatactcttctagctc

SEQ ID NO: 55457 - DNA, 20 bp, Artificial Sequence
  chemically synthesized
gttttcttctgctctaattt

SEQ ID NO: 55458 - DNA, 20 bp, Artificial Sequence
  chemically synthesized
atgtttctacattagtgagt

SEQ ID NO: 55459 - DNA, 20 bp, Artificial Sequence
  chemically synthesized
ttggataacaatatagattg

SEQ ID NO: 55460 - DNA, 20 bp, Artificial Sequence
  chemically synthesized
caaattaatcctctgtattc

SEQ ID NO: 55461 - DNA, 20 bp, Artificial Sequence
  chemically synthesized
aaattaatcctctgtattca

SEQ ID NO: 55462 - DNA, 20 bp, Artificial Sequence
  chemically synthesized
aattaatcctctgtattcag

SEQ ID NO: 55463 - DNA, 20 bp, Artificial Sequence
  chemically synthesized
atgtctagtgccactttcat

SEQ ID NO: 55464 - DNA, 20 bp, Artificial Sequence
  chemically synthesized
gccactttcataggcaaatc

SEQ ID NO: 55465 - DNA, 20 bp, Artificial Sequence
  chemically synthesized
accaagtcgtagccacattc

SEQ ID NO: 55466 - DNA, 20 bp, Artificial Sequence
  chemically synthesized
attctggcttatgagattca

SEQ ID NO: 55467 - DNA, 20 bp, Artificial Sequence
  chemically synthesized
ttctggcttatgagattcat

SEQ ID NO: 55468 - DNA, 20 bp, Artificial Sequence
  chemically synthesized
agattcatgggaccagcatg

SEQ ID NO: 55469 - DNA, 20 bp, Artificial Sequence
  chemically synthesized
cagcatgaggtaaagaaaag

SEQ ID NO: 55470 - DNA, 20 bp, Artificial Sequence
  chemically synthesized
tgtttttattttaaagccca

SEQ ID NO: 55471 - DNA, 20 bp, Artificial Sequence
  chemically synthesized
aatttttacccttcataatc

SEQ ID NO: 55472 - DNA, 20 bp, Artificial Sequence
  chemically synthesized
gctctcttcatgatttgttg

SEQ ID NO: 55473 - DNA, 20 bp, Artificial Sequence
  chemically synthesized
tcttcatgatttgttgaggt

SEQ ID NO: 55474 - DNA, 20 bp, Artificial Sequence
  chemically synthesized
ttgttgaggttggaatgatt

SEQ ID NO: 55475 - DNA, 20 bp, Artificial Sequence
  chemically synthesized
gcagtccctgaaatttattt

SEQ ID NO: 55476 - DNA, 20 bp, Artificial Sequence
  chemically synthesized
cagtccctgaaatttatttt

SEQ ID NO: 55477 - DNA, 20 bp, Artificial Sequence
  chemically synthesized
agtccctgaaatttattttg

SEQ ID NO: 55478 - DNA, 20 bp, Artificial Sequence
  chemically synthesized
ccctgaaatttattttgggg

SEQ ID NO: 55479 - DNA, 20 bp, Artificial Sequence
  chemically synthesized
tgaaatttattttggggagg

SEQ ID NO: 55480 - DNA, 20 bp, Artificial Sequence
  chemically synthesized
aatttattttggggaggagg

SEQ ID NO: 55481 - DNA, 20 bp, Artificial Sequence
  chemically synthesized
gggaggaggtggcagaagag

SEQ ID NO: 55482 - DNA, 20 bp, Artificial Sequence
  chemically synthesized
gcagaagagtggagtgtacc

SEQ ID NO: 55483 - DNA, 20 bp, Artificial Sequence
  chemically synthesized
tcttgctgtcctgttttttc

SEQ ID NO: 55484 - DNA, 20 bp, Artificial Sequence
  chemically synthesized
ctgttttttcaggccaagat

SEQ ID NO: 55485 - DNA, 20 bp, Artificial Sequence
  chemically synthesized
ccaattgaaaagcaacttag

SEQ ID NO: 55486 - DNA, 20 bp, Artificial Sequence
  chemically synthesized
aaaagcaacttagtggagaa

SEQ ID NO: 55487 - DNA, 20 bp, Artificial Sequence
  chemically synthesized
gcaacttagtggagaaagga

SEQ ID NO: 55488 - DNA, 20 bp, Artificial Sequence
  chemically synthesized
gattatgaataaatgctgcc

SEQ ID NO: 55489 - DNA, 20 bp, Artificial Sequence
  chemically synthesized
atacatgaatttttttgaga

SEQ ID NO: 55490 - DNA, 20 bp, Artificial Sequence
  chemically synthesized
ggagtcttgctcagtcatcc

SEQ ID NO: 55491 - DNA, 20 bp, Artificial Sequence
  chemically synthesized
tcttgctcagtcatccaggt

SEQ ID NO: 55492 - DNA, 20 bp, Artificial Sequence
  chemically synthesized
tcatccaggttggagtgcaa

SEQ ID NO: 55493 - DNA, 20 bp, Artificial Sequence
  chemically synthesized
ggagtgcaatggcgccatct

SEQ ID NO: 55494 - DNA, 20 bp, Artificial Sequence
  chemically synthesized
tcactgcaacctccgcctcc

SEQ ID NO: 55495 - DNA, 20 bp, Artificial Sequence
  chemically synthesized
cactgcaacctccgcctccc

SEQ ID NO: 55496 - DNA, 20 bp, Artificial Sequence
  chemically synthesized
tcccaagtacctgtgattac

SEQ ID NO: 55497 - DNA, 20 bp, Artificial Sequence
  chemically synthesized
caggcacccgccatcatgcc

SEQ ID NO: 55498 - DNA, 20 bp, Artificial Sequence
  chemically synthesized
tttttgtatttttgtagagc

SEQ ID NO: 55499 - DNA, 20 bp, Artificial Sequence
  chemically synthesized
ttttgtatttttgtagagct

SEQ ID NO: 55500 - DNA, 20 bp, Artificial Sequence
  chemically synthesized
tttgtatttttgtagagctg

SEQ ID NO: 55501 - DNA, 20 bp, Artificial Sequence
  chemically synthesized
gagctggggtttcaccatgt

SEQ ID NO: 55502 - DNA, 20 bp, Artificial Sequence
  chemically synthesized
ggggtttcaccatgttggcc

SEQ ID NO: 55503 - DNA, 20 bp, Artificial Sequence
  chemically synthesized
tttcaccatgttggccaggc

SEQ ID NO: 55504 - DNA, 20 bp, Artificial Sequence
  chemically synthesized
ggtcttgaactcctcacctc

SEQ ID NO: 55505 - DNA, 20 bp, Artificial Sequence
  chemically synthesized
acctcagcctcccaaagtgc

SEQ ID NO: 55506 - DNA, 20 bp, Artificial Sequence
  chemically synthesized
cctcagcctcccaaagtgct

SEQ ID NO: 55507 - DNA, 20 bp, Artificial Sequence
  chemically synthesized
tcccaaagtgctgggattac

SEQ ID NO: 55508 - DNA, 20 bp, Artificial Sequence
  chemically synthesized
acaaaataccagatgattta

SEQ ID NO: 55509 - DNA, 20 bp, Artificial Sequence
  chemically synthesized
aaagctgtagaagaaaagaa

SEQ ID NO: 55510 - DNA, 20 bp, Artificial Sequence
  chemically synthesized
acatgcaactacataaaaag

SEQ ID NO: 55511 - DNA, 20 bp, Artificial Sequence
  chemically synthesized
tgcaactacataaaaagtgg

SEQ ID NO: 55512 - DNA, 20 bp, Artificial Sequence
  chemically synthesized
ccacataaacagctgataga

SEQ ID NO: 55513 - DNA, 20 bp, Artificial Sequence
  chemically synthesized
ttagtatcattaatagataa

SEQ ID NO: 55514 - DNA, 20 bp, Artificial Sequence
  chemically synthesized
agaaaaatgagcaaaaaaat

SEQ ID NO: 55515 - DNA, 20 bp, Artificial Sequence
  chemically synthesized
gaaaaatgagcaaaaaaatt

SEQ ID NO: 55516 - DNA, 20 bp, Artificial Sequence
  chemically synthesized
gggaaaaatctcataaagta

SEQ ID NO: 55517 - DNA, 20 bp, Artificial Sequence
  chemically synthesized
aatacagatataaatagcaa

SEQ ID NO: 55518 - DNA, 20 bp, Artificial Sequence
  chemically synthesized
tatctgtcaaattgatagag

SEQ ID NO: 55519 - DNA, 20 bp, Artificial Sequence
  chemically synthesized
cttaaagataatacactgtg

SEQ ID NO: 55520 - DNA, 20 bp, Artificial Sequence
  chemically synthesized
aaagataatacactgtgtgg

SEQ ID NO: 55521 - DNA, 20 bp, Artificial Sequence
  chemically synthesized
tcactattcacaatgtaaaa

SEQ ID NO: 55522 - DNA, 20 bp, Artificial Sequence
  chemically synthesized
aatgtaaaatggcgtctttc

SEQ ID NO: 55523 - DNA, 20 bp, Artificial Sequence
  chemically synthesized
atctccccttaatatgtgaa

SEQ ID NO: 55524 - DNA, 20 bp, Artificial Sequence
  chemically synthesized
aagaagaagatattgaagtg

SEQ ID NO: 55525 - DNA, 20 bp, Artificial Sequence
  chemically synthesized
gaagatattgaagtgtggaa

SEQ ID NO: 55526 - DNA, 20 bp, Artificial Sequence
  chemically synthesized
aagatattgaagtgtggaaa

SEQ ID NO: 55527 - DNA, 20 bp, Artificial Sequence
  chemically synthesized
aagtgtggaaagggagatcc

SEQ ID NO: 55528 - DNA, 20 bp, Artificial Sequence
  chemically synthesized
agtgtggaaagggagatcct

SEQ ID NO: 55529 - DNA, 20 bp, Artificial Sequence
  chemically synthesized
acaacttcagagaatgctta

SEQ ID NO: 55530 - DNA, 20 bp, Artificial Sequence
  chemically synthesized
caacttcagagaatgcttat

SEQ ID NO: 55531 - DNA, 20 bp, Artificial Sequence
  chemically synthesized
gagaatgcttatgggactaa

SEQ ID NO: 55532 - DNA, 20 bp, Artificial Sequence
  chemically synthesized
gaatcccaattgaaatgatt

SEQ ID NO: 55533 - DNA, 20 bp, Artificial Sequence
  chemically synthesized
aatcccaattgaaatgattt

SEQ ID NO: 55534 - DNA, 20 bp, Artificial Sequence
  chemically synthesized
tgaaatgatttgggagattt

SEQ ID NO: 55535 - DNA, 20 bp, Artificial Sequence
  chemically synthesized
cctgcagagaaagctccaac

SEQ ID NO: 55536 - DNA, 20 bp, Artificial Sequence
  chemically synthesized
atccctgatcactattttaa

SEQ ID NO: 55537 - DNA, 20 bp, Artificial Sequence
  chemically synthesized
atcactattttaaaggcttc

SEQ ID NO: 55538 - DNA, 20 bp, Artificial Sequence
  chemically synthesized
ttaaaggcttctggagtgaa

SEQ ID NO: 55539 - DNA, 20 bp, Artificial Sequence
  chemically synthesized
ccagagatcaataatagctc

SEQ ID NO: 55540 - DNA, 20 bp, Artificial Sequence
  chemically synthesized
gatcaataatagctcaggta

SEQ ID NO: 55541 - DNA, 20 bp, Artificial Sequence
  chemically synthesized
ataatagctcaggtaaggaa

SEQ ID NO: 55542 - DNA, 20 bp, Artificial Sequence
  chemically synthesized
atagctcaggtaaggaatgg

SEQ ID NO: 55543 - DNA, 20 bp, Artificial Sequence
  chemically synthesized
gtgctttgcatgtcaaagtg

SEQ ID NO: 55544 - DNA, 20 bp, Artificial Sequence
  chemically synthesized
tgctttgcatgtcaaagtgt

SEQ ID NO: 55545 - DNA, 20 bp, Artificial Sequence
  chemically synthesized
aaagtgtgggagcaagtgag

SEQ ID NO: 55546 - DNA, 20 bp, Artificial Sequence
  chemically synthesized
ttgaaactaacctgcaaaat

SEQ ID NO: 55547 - DNA, 20 bp, Artificial Sequence
  chemically synthesized
cctgcaaaataggacaccct

SEQ ID NO: 55548 - DNA, 20 bp, Artificial Sequence
  chemically synthesized
gcaaaataggacacccttgg

SEQ ID NO: 55549 - DNA, 20 bp, Artificial Sequence
  chemically synthesized
caaaataggacacccttgga

SEQ ID NO: 55550 - DNA, 20 bp, Artificial Sequence
  chemically synthesized
gggcactcttacactttctt

SEQ ID NO: 55551 - DNA, 20 bp, Artificial Sequence
  chemically synthesized
tgcgccttttgtgaagaaca

SEQ ID NO: 55552 - DNA, 20 bp, Artificial Sequence
  chemically synthesized
tgtgaagaacaaggaagcag

SEQ ID NO: 55553 - DNA, 20 bp, Artificial Sequence
  chemically synthesized
gtgaagaacaaggaagcaga

SEQ ID NO: 55554 - DNA, 20 bp, Artificial Sequence
  chemically synthesized
gaacaaggaagcagagggag

SEQ ID NO: 55555 - DNA, 20 bp, Artificial Sequence
  chemically synthesized
aacaaggaagcagagggagt

SEQ ID NO: 55556 - DNA, 20 bp, Artificial Sequence
  chemically synthesized
acaaggaagcagagggagtg

SEQ ID NO: 55557 - DNA, 20 bp, Artificial Sequence
  chemically synthesized
gtacaagccatctgtattcc

SEQ ID NO: 55558 - DNA, 20 bp, Artificial Sequence
  chemically synthesized
tccagttaaccaatttagcc

SEQ ID NO: 55559 - DNA, 20 bp, Artificial Sequence
  chemically synthesized
ccagttaaccaatttagcct

SEQ ID NO: 55560 - DNA, 20 bp, Artificial Sequence
  chemically synthesized
aatttagcctgggaccccaa

SEQ ID NO: 55561 - DNA, 20 bp, Artificial Sequence
  chemically synthesized
cccaatggctgctgtctcta

SEQ ID NO: 55562 - DNA, 20 bp, Artificial Sequence
  chemically synthesized
cctttaagaagcacctttat

SEQ ID NO: 55563 - DNA, 20 bp, Artificial Sequence
  chemically synthesized
gaagcacctttattggtgtc

SEQ ID NO: 55564 - DNA, 20 bp, Artificial Sequence
  chemically synthesized
tttattggtgtcaggtatgc

SEQ ID NO: 55565 - DNA, 20 bp, Artificial Sequence
  chemically synthesized
gtcaggtatgcaggcaagtg

SEQ ID NO: 55566 - DNA, 20 bp, Artificial Sequence
  chemically synthesized
cctatgtctccttttccaga

SEQ ID NO: 55567 - DNA, 20 bp, Artificial Sequence
  chemically synthesized
cagaaggatgaagatgtctt

SEQ ID NO: 55568 - DNA, 20 bp, Artificial Sequence
  chemically synthesized
agaaggatgaagatgtcttt

SEQ ID NO: 55569 - DNA, 20 bp, Artificial Sequence
  chemically synthesized
gatgaagatgtctttgggac

SEQ ID NO: 55570 - DNA, 20 bp, Artificial Sequence
  chemically synthesized
gactggaactgagaatgtgt

SEQ ID NO: 55571 - DNA, 20 bp, Artificial Sequence
  chemically synthesized
tcctccctaaaatttgcaac

SEQ ID NO: 55572 - DNA, 20 bp, Artificial Sequence
  chemically synthesized
cctccctaaaatttgcaaca

SEQ ID NO: 55573 - DNA, 20 bp, Artificial Sequence
  chemically synthesized
ctccctaaaatttgcaacag

SEQ ID NO: 55574 - DNA, 20 bp, Artificial Sequence
  chemically synthesized
cctctcatcatctcctgctc

SEQ ID NO: 55575 - DNA, 20 bp, Artificial Sequence
  chemically synthesized
ctgctctggcttcttttcct

SEQ ID NO: 55576 - DNA, 20 bp, Artificial Sequence
  chemically synthesized
tccttggtagaaagtcaaga

SEQ ID NO: 55577 - DNA, 20 bp, Artificial Sequence
  chemically synthesized
ccttggtagaaagtcaagaa

SEQ ID NO: 55578 - DNA, 20 bp, Artificial Sequence
  chemically synthesized
tcaagaagggaagagagcat

SEQ ID NO: 55579 - DNA, 20 bp, Artificial Sequence
  chemically synthesized
gatcacgtttacatttcaag

SEQ ID NO: 55580 - DNA, 20 bp, Artificial Sequence
  chemically synthesized
atttcaagtggcagatgctc

SEQ ID NO: 55581 - DNA, 20 bp, Artificial Sequence
  chemically synthesized
tttcaagtggcagatgctct

SEQ ID NO: 55582 - DNA, 20 bp, Artificial Sequence
  chemically synthesized
agtggcagatgctctgggcc

SEQ ID NO: 55583 - DNA, 20 bp, Artificial Sequence
  chemically synthesized
ttaactgaaaagcaactttc

SEQ ID NO: 55584 - DNA, 20 bp, Artificial Sequence
  chemically synthesized
aactttcaggaaataataag

SEQ ID NO: 55585 - DNA, 20 bp, Artificial Sequence
  chemically synthesized
actttcaggaaataataagt

SEQ ID NO: 55586 - DNA, 20 bp, Artificial Sequence
  chemically synthesized
gagaccctacccccactgca

SEQ ID NO: 55587 - DNA, 20 bp, Artificial Sequence
  chemically synthesized
acaatctattcttgctttcc

SEQ ID NO: 55588 - DNA, 20 bp, Artificial Sequence
  chemically synthesized
caatctattcttgctttcca

SEQ ID NO: 55589 - DNA, 20 bp, Artificial Sequence
  chemically synthesized
aatctattcttgctttccag

SEQ ID NO: 55590 - DNA, 20 bp, Artificial Sequence
  chemically synthesized
ttcttgctttccaggggaga

SEQ ID NO: 55591 - DNA, 20 bp, Artificial Sequence
  chemically synthesized
ttttttctctgtcgctctgt

SEQ ID NO: 55592 - DNA, 20 bp, Artificial Sequence
  chemically synthesized
tgtcgctctgttggtcatct

SEQ ID NO: 55593 - DNA, 20 bp, Artificial Sequence
  chemically synthesized
tcatcttggcctgtgtgtta

SEQ ID NO: 55594 - DNA, 20 bp, Artificial Sequence
  chemically synthesized
cctgtgtgttatggaaaaaa

SEQ ID NO: 55595 - DNA, 20 bp, Artificial Sequence
  chemically synthesized
accttcttcaactaataaag

SEQ ID NO: 55596 - DNA, 20 bp, Artificial Sequence
  chemically synthesized
ccttcttcaactaataaaga

SEQ ID NO: 55597 - DNA, 20 bp, Artificial Sequence
  chemically synthesized
taataaagagggtgattgtg

SEQ ID NO: 55598 - DNA, 20 bp, Artificial Sequence
  chemically synthesized
aataaagagggtgattgtgt

SEQ ID NO: 55599 - DNA, 20 bp, Artificial Sequence
  chemically synthesized
agggtgattgtgtgggatca

SEQ ID NO: 55600 - DNA, 20 bp, Artificial Sequence
  chemically synthesized
tattgatgagaaaaccacaa

SEQ ID NO: 55601 - DNA, 20 bp, Artificial Sequence
  chemically synthesized
attgatgagaaaaccacaaa

SEQ ID NO: 55602 - DNA, 20 bp, Artificial Sequence
  chemically synthesized
ttgatgagaaaaccacaaag

SEQ ID NO: 55603 - DNA, 20 bp, Artificial Sequence
  chemically synthesized
gaaaaccacaaaggggatta

SEQ ID NO: 55604 - DNA, 20 bp, Artificial Sequence
  chemically synthesized
tccacagttaatttcataag

SEQ ID NO: 55605 - DNA, 20 bp, Artificial Sequence
  chemically synthesized
agaggcaaaaagatattaac

SEQ ID NO: 55606 - DNA, 20 bp, Artificial Sequence
  chemically synthesized
aaagatattaactggacatt

SEQ ID NO: 55607 - DNA, 20 bp, Artificial Sequence
  chemically synthesized
tttcttccagtatctcctaa

SEQ ID NO: 55608 - DNA, 20 bp, Artificial Sequence
  chemically synthesized
gttgcagaagccatcattca

SEQ ID NO: 55609 - DNA, 20 bp, Artificial Sequence
  chemically synthesized
actttaagcatataaattca

SEQ ID NO: 55610 - DNA, 20 bp, Artificial Sequence
  chemically synthesized
ctttaagcatataaattcat

SEQ ID NO: 55611 - DNA, 20 bp, Artificial Sequence
  chemically synthesized
ttttatactaatccatgcta

SEQ ID NO: 55612 - DNA, 20 bp, Artificial Sequence
  chemically synthesized
gttaaattacttactattct

SEQ ID NO: 55613 - DNA, 20 bp, Artificial Sequence
  chemically synthesized
ctattctaggagaatgccct

SEQ ID NO: 55614 - DNA, 20 bp, Artificial Sequence
  chemically synthesized
aggagaatgcccttggcaga

SEQ ID NO: 55615 - DNA, 20 bp, Artificial Sequence
  chemically synthesized
gcagaaggctacatatcccc

SEQ ID NO: 55616 - DNA, 20 bp, Artificial Sequence
  chemically synthesized
ctaatttgaaaagtactgcc

SEQ ID NO: 55617 - DNA, 20 bp, Artificial Sequence
  chemically synthesized
aaagtactaagcaatttccc

SEQ ID NO: 55618 - DNA, 20 bp, Artificial Sequence
  chemically synthesized
aagtactaagcaatttccct

SEQ ID NO: 55619 - DNA, 20 bp, Artificial Sequence
  chemically synthesized
taaaaagacaacacttaaat

SEQ ID NO: 55620 - DNA, 20 bp, Artificial Sequence
  chemically synthesized
aaaaagacaacacttaaatt

SEQ ID NO: 55621 - DNA, 20 bp, Artificial Sequence
  chemically synthesized
cttaaattgggagtaaacaa

SEQ ID NO: 55622 - DNA, 20 bp, Artificial Sequence
  chemically synthesized
ttaaattgggagtaaacaac

SEQ ID NO: 55623 - DNA, 20 bp, Artificial Sequence
  chemically synthesized
taaattgggagtaaacaacg

SEQ ID NO: 55624 - DNA, 20 bp, Artificial Sequence
  chemically synthesized
aattacctccttgcaagcct

SEQ ID NO: 55625 - DNA, 20 bp, Artificial Sequence
  chemically synthesized
ccttggtgttccttccctct

SEQ ID NO: 55626 - DNA, 20 bp, Artificial Sequence
  chemically synthesized
cttggtgttccttccctcta

SEQ ID NO: 55627 - DNA, 20 bp, Artificial Sequence
  chemically synthesized
cctctagggctttttcccag

SEQ ID NO: 55628 - DNA, 20 bp, Artificial Sequence
  chemically synthesized
gtcatgtcttgttcacagaa

SEQ ID NO: 55629 - DNA, 20 bp, Artificial Sequence
  chemically synthesized
acagaatggattgatatctg

SEQ ID NO: 55630 - DNA, 20 bp, Artificial Sequence
  chemically synthesized
ggattgatatctgtggtctc

SEQ ID NO: 55631 - DNA, 20 bp, Artificial Sequence
  chemically synthesized
caacccctccttgaattgat

SEQ ID NO: 55632 - DNA, 20 bp, Artificial Sequence
  chemically synthesized
aacccctccttgaattgata

SEQ ID NO: 55633 - DNA, 20 bp, Artificial Sequence
  chemically synthesized
cttgaattgatagggccccg

SEQ ID NO: 55634 - DNA, 20 bp, Artificial Sequence
  chemically synthesized
gaaagccagtctcttgacca

SEQ ID NO: 55635 - DNA, 20 bp, Artificial Sequence
  chemically synthesized
gattccaagctcagaataag

SEQ ID NO: 55636 - DNA, 20 bp, Artificial Sequence
  chemically synthesized
attccaagctcagaataagt

SEQ ID NO: 55637 - DNA, 20 bp, Artificial Sequence
  chemically synthesized
tatcaatgttctctgatttc

SEQ ID NO: 55638 - DNA, 20 bp, Artificial Sequence
  chemically synthesized
tcaggattaagcctatcgta

SEQ ID NO: 55639 - DNA, 20 bp, Artificial Sequence
  chemically synthesized
ccccgatcataagaagactc

SEQ ID NO: 55640 - DNA, 20 bp, Artificial Sequence
  chemically synthesized
ccaagaaaagtgagtgtttt

SEQ ID NO: 55641 - DNA, 20 bp, Artificial Sequence
  chemically synthesized
gtgcttaaaaagtgttgtgt

SEQ ID NO: 55642 - DNA, 20 bp, Artificial Sequence
  chemically synthesized
ttgtgttggcaacatcccag

SEQ ID NO: 55643 - DNA, 20 bp, Artificial Sequence
  chemically synthesized
gtggccaagaatgatattcc

SEQ ID NO: 55644 - DNA, 20 bp, Artificial Sequence
  chemically synthesized
aagaatgatattccaggaca

SEQ ID NO: 55645 - DNA, 20 bp, Artificial Sequence
  chemically synthesized
aacagttgaacctcaccttt

SEQ ID NO: 55646 - DNA, 20 bp, Artificial Sequence
  chemically synthesized
atttgattcatcctgtaact

SEQ ID NO: 55647 - DNA, 20 bp, Artificial Sequence
  chemically synthesized
tttgattcatcctgtaacta

SEQ ID NO: 55648 - DNA, 20 bp, Artificial Sequence
  chemically synthesized
cctaagaccctagctgcagt

SEQ ID NO: 55649 - DNA, 20 bp, Artificial Sequence
  chemically synthesized
ctaagaccctagctgcagta

SEQ ID NO: 55650 - DNA, 20 bp, Artificial Sequence
  chemically synthesized
gatacacatctcagaacttc

SEQ ID NO: 55651 - DNA, 20 bp, Artificial Sequence
  chemically synthesized
atacacatctcagaacttct

SEQ ID NO: 55652 - DNA, 20 bp, Artificial Sequence
  chemically synthesized
ctcagaacttctgggctccc

SEQ ID NO: 55653 - DNA, 20 bp, Artificial Sequence
  chemically synthesized
tcagaacttctgggctccct

SEQ ID NO: 55654 - DNA, 20 bp, Artificial Sequence
  chemically synthesized
cagaacttctgggctccctg

SEQ ID NO: 55655 - DNA, 20 bp, Artificial Sequence
  chemically synthesized
acttctgggctccctggggc

SEQ ID NO: 55656 - DNA, 20 bp, Artificial Sequence
  chemically synthesized
tctgggctccctggggctgg

SEQ ID NO: 55657 - DNA, 20 bp, Artificial Sequence
  chemically synthesized
ctgggctccctggggctgga

SEQ ID NO: 55658 - DNA, 20 bp, Artificial Sequence
  chemically synthesized
gggctggagggcacagccag

SEQ ID NO: 55659 - DNA, 20 bp, Artificial Sequence
  chemically synthesized
cagaagcaaagagtccattg

SEQ ID NO: 55660 - DNA, 20 bp, Artificial Sequence
  chemically synthesized
gagtccattgaggaacatgc

SEQ ID NO: 55661 - DNA, 20 bp, Artificial Sequence
  chemically synthesized
ctcctgaactgaacatttga

SEQ ID NO: 55662 - DNA, 20 bp, Artificial Sequence
  chemically synthesized
catttgatggtgtgtctctc

SEQ ID NO: 55663 - DNA, 20 bp, Artificial Sequence
  chemically synthesized
tttcaatcctgaaagtttcc

SEQ ID NO: 55664 - DNA, 20 bp, Artificial Sequence
  chemically synthesized
tcctggactgccagattcat

SEQ ID NO: 55665 - DNA, 20 bp, Artificial Sequence
  chemically synthesized
cctggactgccagattcata

SEQ ID NO: 55666 - DNA, 20 bp, Artificial Sequence
  chemically synthesized
ggactgccagattcataggg

SEQ ID NO: 55667 - DNA, 20 bp, Artificial Sequence
  chemically synthesized
cattcaagctagagatgaag

SEQ ID NO: 55668 - DNA, 20 bp, Artificial Sequence
  chemically synthesized
caagctagagatgaagtgga

SEQ ID NO: 55669 - DNA, 20 bp, Artificial Sequence
  chemically synthesized
tagaagaatctgagaagcag

SEQ ID NO: 55670 - DNA, 20 bp, Artificial Sequence
  chemically synthesized
gaatctgagaagcagaggct

SEQ ID NO: 55671 - DNA, 20 bp, Artificial Sequence
  chemically synthesized
tctgagaagcagaggcttgg

SEQ ID NO: 55672 - DNA, 20 bp, Artificial Sequence
  chemically synthesized
ctgagaagcagaggcttgga

SEQ ID NO: 55673 - DNA, 20 bp, Artificial Sequence
  chemically synthesized
tgagaagcagaggcttggag

SEQ ID NO: 55674 - DNA, 20 bp, Artificial Sequence
  chemically synthesized
gagccccaactgcccatctg

SEQ ID NO: 55675 - DNA, 20 bp, Artificial Sequence
  chemically synthesized
gtcatcactccagaaagctt

SEQ ID NO: 55676 - DNA, 20 bp, Artificial Sequence
  chemically synthesized
agattcatccctcacatgcc

SEQ ID NO: 55677 - DNA, 20 bp, Artificial Sequence
  chemically synthesized
tcatccctcacatgcctggc

SEQ ID NO: 55678 - DNA, 20 bp, Artificial Sequence
  chemically synthesized
catccctcacatgcctggct

SEQ ID NO: 55679 - DNA, 20 bp, Artificial Sequence
  chemically synthesized
cccctattctctcctcttcc

SEQ ID NO: 55680 - DNA, 20 bp, Artificial Sequence
  chemically synthesized
cttccaggtccctagactgc

SEQ ID NO: 55681 - DNA, 20 bp, Artificial Sequence
  chemically synthesized
ttccaggtccctagactgca

SEQ ID NO: 55682 - DNA, 20 bp, Artificial Sequence
  chemically synthesized
tccctagactgcagggagag

SEQ ID NO: 55683 - DNA, 20 bp, Artificial Sequence
  chemically synthesized
tgcagggagagtggcaagaa

SEQ ID NO: 55684 - DNA, 20 bp, Artificial Sequence
  chemically synthesized
gcagggagagtggcaagaat

SEQ ID NO: 55685 - DNA, 20 bp, Artificial Sequence
  chemically synthesized
gaatgggcctcatgtgtacc

SEQ ID NO: 55686 - DNA, 20 bp, Artificial Sequence
  chemically synthesized
caggacctcctgcttagcct

SEQ ID NO: 55687 - DNA, 20 bp, Artificial Sequence
  chemically synthesized
aggacctcctgcttagcctt

SEQ ID NO: 55688 - DNA, 20 bp, Artificial Sequence
  chemically synthesized
cctccattttctctccaatc

SEQ ID NO: 55689 - DNA, 20 bp, Artificial Sequence
  chemically synthesized
gacattgaacccagttgctc

SEQ ID NO: 55690 - DNA, 20 bp, Artificial Sequence
  chemically synthesized
acattgaacccagttgctca

SEQ ID NO: 55691 - DNA, 20 bp, Artificial Sequence
  chemically synthesized
tcagcccattcttacttccc

SEQ ID NO: 55692 - DNA, 20 bp, Artificial Sequence
  chemically synthesized
cagcccattcttacttccct

SEQ ID NO: 55693 - DNA, 20 bp, Artificial Sequence
  chemically synthesized
agcgacaaagatgatttaaa

SEQ ID NO: 55694 - DNA, 20 bp, Artificial Sequence
  chemically synthesized
gcgacaaagatgatttaaaa

SEQ ID NO: 55695 - DNA, 20 bp, Artificial Sequence
  chemically synthesized
accactcttcctgagttcag

SEQ ID NO: 55696 - DNA, 20 bp, Artificial Sequence
  chemically synthesized
agcatcctgcttctaccatg

SEQ ID NO: 55697 - DNA, 20 bp, Artificial Sequence
  chemically synthesized
ctgcttctaccatgtggatt

SEQ ID NO: 55698 - DNA, 20 bp, Artificial Sequence
  chemically synthesized
accatgtggatttggtcaca

SEQ ID NO: 55699 - DNA, 20 bp, Artificial Sequence
  chemically synthesized
ggatttggtcacaaggttta

SEQ ID NO: 55700 - DNA, 20 bp, Artificial Sequence
  chemically synthesized
cagctatttaaaaaaaaaag

SEQ ID NO: 55701 - DNA, 20 bp, Artificial Sequence
  chemically synthesized
aggaaagaatgaaagagtaa

SEQ ID NO: 55702 - DNA, 20 bp, Artificial Sequence
  chemically synthesized
aagagtaaaggaaatgattg

SEQ ID NO: 55703 - DNA, 20 bp, Artificial Sequence
  chemically synthesized
aaggaaatgattgaggagtg

SEQ ID NO: 55704 - DNA, 20 bp, Artificial Sequence
  chemically synthesized
aaatgattgaggagtgagga

SEQ ID NO: 55705 - DNA, 20 bp, Artificial Sequence
  chemically synthesized
gattgaggagtgaggaaggc

SEQ ID NO: 55706 - DNA, 20 bp, Artificial Sequence
  chemically synthesized
aggcaggaagagagcatgag

SEQ ID NO: 55707 - DNA, 20 bp, Artificial Sequence
  chemically synthesized
gcatgagaggaaagaaagaa

SEQ ID NO: 55708 - DNA, 20 bp, Artificial Sequence
  chemically synthesized
aaatgatagttgccattatt

SEQ ID NO: 55709 - DNA, 20 bp, Artificial Sequence
  chemically synthesized
ctccatcctgacaataatcc

SEQ ID NO: 55710 - DNA, 20 bp, Artificial Sequence
  chemically synthesized
tccatcctgacaataatcct

SEQ ID NO: 55711 - DNA, 20 bp, Artificial Sequence
  chemically synthesized
atcctgacaataatcctggg

SEQ ID NO: 55712 - DNA, 20 bp, Artificial Sequence
  chemically synthesized
gatcattaaattcagaacta

SEQ ID NO: 55713 - DNA, 20 bp, Artificial Sequence
  chemically synthesized
ccaagttgttcacacagtga

SEQ ID NO: 55714 - DNA, 20 bp, Artificial Sequence
  chemically synthesized
caagttgttcacacagtgaa

SEQ ID NO: 55715 - DNA, 20 bp, Artificial Sequence
  chemically synthesized
gttgttcacacagtgaaggg

SEQ ID NO: 55716 - DNA, 20 bp, Artificial Sequence
  chemically synthesized
ttgttcacacagtgaaggga

SEQ ID NO: 55717 - DNA, 20 bp, Artificial Sequence
  chemically synthesized
tgttcacacagtgaagggag

SEQ ID NO: 55718 - DNA, 20 bp, Artificial Sequence
  chemically synthesized
agggaggggccaagatatga

SEQ ID NO: 55719 - DNA, 20 bp, Artificial Sequence
  chemically synthesized
aggggccaagatatgatggc

SEQ ID NO: 55720 - DNA, 20 bp, Artificial Sequence
  chemically synthesized
ggggccaagatatgatggct

SEQ ID NO: 55721 - DNA, 20 bp, Artificial Sequence
  chemically synthesized
atgtgcctttctcttcactg

SEQ ID NO: 55722 - DNA, 20 bp, Artificial Sequence
  chemically synthesized
tgccaaacgtcactagtaac

SEQ ID NO: 55723 - DNA, 20 bp, Artificial Sequence
  chemically synthesized
gccaaacgtcactagtaaca

SEQ ID NO: 55724 - DNA, 20 bp, Artificial Sequence
  chemically synthesized
tgatccaaactgagtcagtt

SEQ ID NO: 55725 - DNA, 20 bp, Artificial Sequence
  chemically synthesized
gagtcagtttggaaagtgaa

SEQ ID NO: 55726 - DNA, 20 bp, Artificial Sequence
  chemically synthesized
agtcagtttggaaagtgaaa

SEQ ID NO: 55727 - DNA, 20 bp, Artificial Sequence
  chemically synthesized
aaacttacatataatccctc

SEQ ID NO: 55728 - DNA, 20 bp, Artificial Sequence
  chemically synthesized
aacttacatataatccctcc

SEQ ID NO: 55729 - DNA, 20 bp, Artificial Sequence
  chemically synthesized
cgggacaatgagcaaaaact

SEQ ID NO: 55730 - DNA, 20 bp, Artificial Sequence
  chemically synthesized
tatcatcacttaaattaaaa

SEQ ID NO: 55731 - DNA, 20 bp, Artificial Sequence
  chemically synthesized
aatggctatgagaaagaaag

SEQ ID NO: 55732 - DNA, 20 bp, Artificial Sequence
  chemically synthesized
atggctatgagaaagaaaga

SEQ ID NO: 55733 - DNA, 20 bp, Artificial Sequence
  chemically synthesized
tggctatgagaaagaaagag

SEQ ID NO: 55734 - DNA, 20 bp, Artificial Sequence
  chemically synthesized
ggctatgagaaagaaagagg

SEQ ID NO: 55735 - DNA, 20 bp, Artificial Sequence
  chemically synthesized
gagggggagaaacagtcttg

SEQ ID NO: 55736 - DNA, 20 bp, Artificial Sequence
  chemically synthesized
agggggagaaacagtcttgc

SEQ ID NO: 55737 - DNA, 20 bp, Artificial Sequence
  chemically synthesized
tgaccagccatgtcaaaaga

SEQ ID NO: 55738 - DNA, 20 bp, Artificial Sequence
  chemically synthesized
aaaaagccatgaagcccatt

SEQ ID NO: 55739 - DNA, 20 bp, Artificial Sequence
  chemically synthesized
ggtttcatttttctgaaaat

SEQ ID NO: 55740 - DNA, 20 bp, Artificial Sequence
  chemically synthesized
tttctgaaaataggctcaag

SEQ ID NO: 55741 - DNA, 20 bp, Artificial Sequence
  chemically synthesized
ttctgaaaataggctcaaga

SEQ ID NO: 55742 - DNA, 20 bp, Artificial Sequence
  chemically synthesized
gcatccgtccatgatctcag

SEQ ID NO: 55743 - DNA, 20 bp, Artificial Sequence
  chemically synthesized
gaggaaactgtcgctgaccc

SEQ ID NO: 55744 - DNA, 20 bp, Artificial Sequence
  chemically synthesized
actgtcgctgaccctggaca

SEQ ID NO: 55745 - DNA, 20 bp, Artificial Sequence
  chemically synthesized
ctgtcgctgaccctggacat

SEQ ID NO: 55746 - DNA, 20 bp, Artificial Sequence
  chemically synthesized
gggtacgtttgacgagtgag

SEQ ID NO: 55747 - DNA, 20 bp, Artificial Sequence
  chemically synthesized
tacgtttgacgagtgagagg

SEQ ID NO: 55748 - DNA, 20 bp, Artificial Sequence
  chemically synthesized
cccaagttctccagcaatag

SEQ ID NO: 55749 - DNA, 20 bp, Artificial Sequence
  chemically synthesized
tagaggctgccacaaacttc

SEQ ID NO: 55750 - DNA, 20 bp, Artificial Sequence
  chemically synthesized
agaggctgccacaaacttca

SEQ ID NO: 55751 - DNA, 20 bp, Artificial Sequence
  chemically synthesized
tgcaatgagtgaactgactg

SEQ ID NO: 55752 - DNA, 20 bp, Artificial Sequence
  chemically synthesized
gctacaatcttgaagatata

SEQ ID NO: 55753 - DNA, 20 bp, Artificial Sequence
  chemically synthesized
atatatcatcttgcctttct

SEQ ID NO: 55754 - DNA, 20 bp, Artificial Sequence
  chemically synthesized
taatgactaactcaaagtca

SEQ ID NO: 55755 - DNA, 20 bp, Artificial Sequence
  chemically synthesized
gcagcaaacccatctcccac

SEQ ID NO: 55756 - DNA, 20 bp, Artificial Sequence
  chemically synthesized
tcccacaggcctccaaaccc

SEQ ID NO: 55757 - DNA, 20 bp, Artificial Sequence
  chemically synthesized
ggctgttcacagaaccacaa

SEQ ID NO: 55758 - DNA, 20 bp, Artificial Sequence
  chemically synthesized
gctgttcacagaaccacaaa

SEQ ID NO: 55759 - DNA, 20 bp, Artificial Sequence
  chemically synthesized
gctgcacagaaaactagaga

SEQ ID NO: 55760 - DNA, 20 bp, Artificial Sequence
  chemically synthesized
ctgcacagaaaactagagaa

SEQ ID NO: 55761 - DNA, 20 bp, Artificial Sequence
  chemically synthesized
tgcacagaaaactagagaag

SEQ ID NO: 55762 - DNA, 20 bp, Artificial Sequence
  chemically synthesized
aaaactagagaaggggtcat

SEQ ID NO: 55763 - DNA, 20 bp, Artificial Sequence
  chemically synthesized
gagaaggggtcataggttca

SEQ ID NO: 55764 - DNA, 20 bp, Artificial Sequence
  chemically synthesized
gttctgtttttactttattt

SEQ ID NO: 55765 - DNA, 20 bp, Artificial Sequence
  chemically synthesized
ttctgtttttactttattta

SEQ ID NO: 55766 - DNA, 20 bp, Artificial Sequence
  chemically synthesized
tctgtttttactttatttag

SEQ ID NO: 55767 - DNA, 20 bp, Artificial Sequence
  chemically synthesized
ctgtttttactttatttagg

SEQ ID NO: 55768 - DNA, 20 bp, Artificial Sequence
  chemically synthesized
ttactttatttagggggact

SEQ ID NO: 55769 - DNA, 20 bp, Artificial Sequence
  chemically synthesized
tgttttgtgttgtctgtgaa

SEQ ID NO: 55770 - DNA, 20 bp, Artificial Sequence
  chemically synthesized
gttttgtgttgtctgtgaat

SEQ ID NO: 55771 - DNA, 20 bp, Artificial Sequence
  chemically synthesized
ttttgtgttgtctgtgaatg

SEQ ID NO: 55772 - DNA, 20 bp, Artificial Sequence
  chemically synthesized
tgtgaatggggttttaactg

SEQ ID NO: 55773 - DNA, 20 bp, Artificial Sequence
  chemically synthesized
gggttttaactgtggatgaa

SEQ ID NO: 55774 - DNA, 20 bp, Artificial Sequence
  chemically synthesized
gatgaatggaccttatctgt

SEQ ID NO: 55775 - DNA, 20 bp, Artificial Sequence
  chemically synthesized
gaccttatctgttggcttaa

SEQ ID NO: 55776 - DNA, 20 bp, Artificial Sequence
  chemically synthesized
tatctgttggcttaaaggac

SEQ ID NO: 55777 - DNA, 20 bp, Artificial Sequence
  chemically synthesized
atcagaccatcttattcttc

SEQ ID NO: 55778 - DNA, 20 bp, Artificial Sequence
  chemically synthesized
atacaatgccataatccctt

SEQ ID NO: 55779 - DNA, 20 bp, Artificial Sequence
  chemically synthesized
attccttccacctccttgat

SEQ ID NO: 55780 - DNA, 20 bp, Artificial Sequence
  chemically synthesized
acctccttgataggcattta

SEQ ID NO: 55781 - DNA, 20 bp, Artificial Sequence
  chemically synthesized
tacatgtcaatcatactgtt

SEQ ID NO: 55782 - DNA, 20 bp, Artificial Sequence
  chemically synthesized
tcaatcatactgttaggcac

SEQ ID NO: 55783 - DNA, 20 bp, Artificial Sequence
  chemically synthesized
caatcatactgttaggcaca

SEQ ID NO: 55784 - DNA, 20 bp, Artificial Sequence
  chemically synthesized
aatcatactgttaggcacag

SEQ ID NO: 55785 - DNA, 20 bp, Artificial Sequence
  chemically synthesized
gggacctaaagacacataaa

SEQ ID NO: 55786 - DNA, 20 bp, Artificial Sequence
  chemically synthesized
cctaaagacacataaaagga

SEQ ID NO: 55787 - DNA, 20 bp, Artificial Sequence
  chemically synthesized
acctaatgaaagtgactgct

SEQ ID NO: 55788 - DNA, 20 bp, Artificial Sequence
  chemically synthesized
ccatattgaaagtgccctgt

SEQ ID NO: 55789 - DNA, 20 bp, Artificial Sequence
  chemically synthesized
gaaagtgccctgttggagac

SEQ ID NO: 55790 - DNA, 20 bp, Artificial Sequence
  chemically synthesized
aaagtgccctgttggagaca

SEQ ID NO: 55791 - DNA, 20 bp, Artificial Sequence
  chemically synthesized
aaaaatgatgtaaatttaca

SEQ ID NO: 55792 - DNA, 20 bp, Artificial Sequence
  chemically synthesized
aatgatgtaaatttacatgg

SEQ ID NO: 55793 - DNA, 20 bp, Artificial Sequence
  chemically synthesized
gaggaaaagtagaatctgcc

SEQ ID NO: 55794 - DNA, 20 bp, Artificial Sequence
  chemically synthesized
gtagaatctgcctggtttgt

SEQ ID NO: 55795 - DNA, 20 bp, Artificial Sequence
  chemically synthesized
cagaagacatttttcatcag

SEQ ID NO: 55796 - DNA, 20 bp, Artificial Sequence
  chemically synthesized
agaagacatttttcatcagt

SEQ ID NO: 55797 - DNA, 20 bp, Artificial Sequence
  chemically synthesized
gacatttttcatcagtgggc

SEQ ID NO: 55798 - DNA, 20 bp, Artificial Sequence
  chemically synthesized
ttctttaccttttgtagaaa

SEQ ID NO: 55799 - DNA, 20 bp, Artificial Sequence
  chemically synthesized
tctttaccttttgtagaaat

SEQ ID NO: 55800 - DNA, 20 bp, Artificial Sequence
  chemically synthesized
atgggagtcaagtctcaaat

SEQ ID NO: 55801 - DNA, 20 bp, Artificial Sequence
  chemically synthesized
ggagtcaagtctcaaatagg

SEQ ID NO: 55802 - DNA, 20 bp, Artificial Sequence
  chemically synthesized
gctccacaaaatctcatgcc

SEQ ID NO: 55803 - DNA, 20 bp, Artificial Sequence
  chemically synthesized
ttgttattttctttgactta

SEQ ID NO: 55804 - DNA, 20 bp, Artificial Sequence
  chemically synthesized
tgttattttctttgacttat

SEQ ID NO: 55805 - DNA, 20 bp, Artificial Sequence
  chemically synthesized
tctttgacttatgggaaaac

SEQ ID NO: 55806 - DNA, 20 bp, Artificial Sequence
  chemically synthesized
ctttgacttatgggaaaact

SEQ ID NO: 55807 - DNA, 20 bp, Artificial Sequence
  chemically synthesized
ttatgggaaaactgggacac

SEQ ID NO: 55808 - DNA, 20 bp, Artificial Sequence
  chemically synthesized
aaactgggacacaggaagac

SEQ ID NO: 55809 - DNA, 20 bp, Artificial Sequence
  chemically synthesized
ctcacacgttaagtcagaac

SEQ ID NO: 55810 - DNA, 20 bp, Artificial Sequence
  chemically synthesized
tcacacgttaagtcagaact

SEQ ID NO: 55811 - DNA, 20 bp, Artificial Sequence
  chemically synthesized
gagccataattttgtatccc

SEQ ID NO: 55812 - DNA, 20 bp, Artificial Sequence
  chemically synthesized
tcctttgtttcaatgttgtt

SEQ ID NO: 55813 - DNA, 20 bp, Artificial Sequence
  chemically synthesized
tgtttggcatatgttatctt

SEQ ID NO: 55814 - DNA, 20 bp, Artificial Sequence
  chemically synthesized
taattcttgattatatacct

SEQ ID NO: 55815 - DNA, 20 bp, Artificial Sequence
  chemically synthesized
aattcttgattatataccta

SEQ ID NO: 55816 - DNA, 20 bp, Artificial Sequence
  chemically synthesized
tgtaatgtaagattactaat

SEQ ID NO: 55817 - DNA, 20 bp, Artificial Sequence
  chemically synthesized
atctcctttcagattttatt

SEQ ID NO: 55818 - DNA, 20 bp, Artificial Sequence
  chemically synthesized
aaaaaaataaacctcctgat

SEQ ID NO: 55819 - DNA, 20 bp, Artificial Sequence
  chemically synthesized
aaatgaaaagacagctaatt

SEQ ID NO: 55820 - DNA, 20 bp, Artificial Sequence
  chemically synthesized
tttggtccaacaaacatgac

SEQ ID NO: 55821 - DNA, 20 bp, Artificial Sequence
  chemically synthesized
ttggtccaacaaacatgact

SEQ ID NO: 55822 - DNA, 20 bp, Artificial Sequence
  chemically synthesized
caacaaacatgactgggtct

SEQ ID NO: 55823 - DNA, 20 bp, Artificial Sequence
  chemically synthesized
aacaaacatgactgggtcta

SEQ ID NO: 55824 - DNA, 20 bp, Artificial Sequence
  chemically synthesized
tgactgggtctagggcaccc

SEQ ID NO: 55825 - DNA, 20 bp, Artificial Sequence
  chemically synthesized
ctttgcctcttccttcaatg

SEQ ID NO: 55826 - DNA, 20 bp, Artificial Sequence
  chemically synthesized
ttccttcaatgtggtttcca

SEQ ID NO: 55827 - DNA, 20 bp, Artificial Sequence
  chemically synthesized
tccttcaatgtggtttccat

SEQ ID NO: 55828 - DNA, 20 bp, Artificial Sequence
  chemically synthesized
tgcttcagaaaagccaagta

SEQ ID NO: 55829 - DNA, 20 bp, Artificial Sequence
  chemically synthesized
gcttcagaaaagccaagtat

SEQ ID NO: 55830 - DNA, 20 bp, Artificial Sequence
  chemically synthesized
gccaagtatgggctgttcag

SEQ ID NO: 55831 - DNA, 20 bp, Artificial Sequence
  chemically synthesized
cattttcttagctcttctag

SEQ ID NO: 55832 - DNA, 20 bp, Artificial Sequence
  chemically synthesized
attttcttagctcttctaga

SEQ ID NO: 55833 - DNA, 20 bp, Artificial Sequence
  chemically synthesized
ttttcttagctcttctagag

SEQ ID NO: 55834 - DNA, 20 bp, Artificial Sequence
  chemically synthesized
tctagaggggctaagagact

SEQ ID NO: 55835 - DNA, 20 bp, Artificial Sequence
  chemically synthesized
aggggctaagagacttggta

SEQ ID NO: 55836 - DNA, 20 bp, Artificial Sequence
  chemically synthesized
ggggctaagagacttggtac

SEQ ID NO: 55837 - DNA, 20 bp, Artificial Sequence
  chemically synthesized
taagagacttggtacgggcc

SEQ ID NO: 55838 - DNA, 20 bp, Artificial Sequence
  chemically synthesized
tacgggccaggaagaatatg

SEQ ID NO: 55839 - DNA, 20 bp, Artificial Sequence
  chemically synthesized
agaatatgtggcagagctcc

SEQ ID NO: 55840 - DNA, 20 bp, Artificial Sequence
  chemically synthesized
tcctggaaatgatgcagatt

SEQ ID NO: 55841 - DNA, 20 bp, Artificial Sequence
  chemically synthesized
tggaaatgatgcagattagg

SEQ ID NO: 55842 - DNA, 20 bp, Artificial Sequence
  chemically synthesized
tggcatttttgtcagctctg

SEQ ID NO: 55843 - DNA, 20 bp, Artificial Sequence
  chemically synthesized
tcagctctgtggtttattgt

SEQ ID NO: 55844 - DNA, 20 bp, Artificial Sequence
  chemically synthesized
cagctctgtggtttattgtt

SEQ ID NO: 55845 - DNA, 20 bp, Artificial Sequence
  chemically synthesized
ccatctcatatttaattaaa

SEQ ID NO: 55846 - DNA, 20 bp, Artificial Sequence
  chemically synthesized
ccatttaattaaatatgaga

SEQ ID NO: 55847 - DNA, 20 bp, Artificial Sequence
  chemically synthesized
cgaaatgtttgtaatgcatg

SEQ ID NO: 55848 - DNA, 20 bp, Artificial Sequence
  chemically synthesized
taatgcatgtggatagtaca

SEQ ID NO: 55849 - DNA, 20 bp, Artificial Sequence
  chemically synthesized
atcttcactgtagtgaacaa

SEQ ID NO: 55850 - DNA, 20 bp, Artificial Sequence
  chemically synthesized
acctaatctgcatcatttcc

SEQ ID NO: 55851 - DNA, 20 bp, Artificial Sequence
  chemically synthesized
gctctgccacatattcttcc

SEQ ID NO: 55852 - DNA, 20 bp, Artificial Sequence
  chemically synthesized
tagaagagctaagaaaatgc

SEQ ID NO: 55853 - DNA, 20 bp, Artificial Sequence
  chemically synthesized
acctctgaacagcccatact

SEQ ID NO: 55854 - DNA, 20 bp, Artificial Sequence
  chemically synthesized
ttttctgaagcaaattccca

SEQ ID NO: 55855 - DNA, 20 bp, Artificial Sequence
  chemically synthesized
tcccatggaaaccacattga

SEQ ID NO: 55856 - DNA, 20 bp, Artificial Sequence
  chemically synthesized
ggaaaccacattgaaggaag

SEQ ID NO: 55857 - DNA, 20 bp, Artificial Sequence
  chemically synthesized
cacattgaaggaagaggcaa

SEQ ID NO: 55858 - DNA, 20 bp, Artificial Sequence
  chemically synthesized
ttgaaggaagaggcaaaggc

SEQ ID NO: 55859 - DNA, 20 bp, Artificial Sequence
  chemically synthesized
aggaagaggcaaaggctggt

SEQ ID NO: 55860 - DNA, 20 bp, Artificial Sequence
  chemically synthesized
ggaaatcagctgaatcagcc

SEQ ID NO: 55861 - DNA, 20 bp, Artificial Sequence
  chemically synthesized
gaaatcagctgaatcagcct

SEQ ID NO: 55862 - DNA, 20 bp, Artificial Sequence
  chemically synthesized
ctagacccagtcatgtttgt

SEQ ID NO: 55863 - DNA, 20 bp, Artificial Sequence
  chemically synthesized
catttcatgctatatagaac

SEQ ID NO: 55864 - DNA, 20 bp, Artificial Sequence
  chemically synthesized
ttaatacattgtctccgatc

SEQ ID NO: 55865 - DNA, 20 bp, Artificial Sequence
  chemically synthesized
atacattgtctccgatcagg

SEQ ID NO: 55866 - DNA, 20 bp, Artificial Sequence
  chemically synthesized
ttttcctaataaaatctgaa

SEQ ID NO: 55867 - DNA, 20 bp, Artificial Sequence
  chemically synthesized
aataaaatctgaaaggagat

SEQ ID NO: 55868 - DNA, 20 bp, Artificial Sequence
  chemically synthesized
ataaaatctgaaaggagatt

SEQ ID NO: 55869 - DNA, 20 bp, Artificial Sequence
  chemically synthesized
ttacattacacattgtccct

SEQ ID NO: 55870 - DNA, 20 bp, Artificial Sequence
  chemically synthesized
aatactacagtaacagacag

SEQ ID NO: 55871 - DNA, 20 bp, Artificial Sequence
  chemically synthesized
gccaaacaacattgaaacaa

SEQ ID NO: 55872 - DNA, 20 bp, Artificial Sequence
  chemically synthesized
gaaacaaaggattttagagc

SEQ ID NO: 55873 - DNA, 20 bp, Artificial Sequence
  chemically synthesized
gatatctcgatgtttttcta

SEQ ID NO: 55874 - DNA, 20 bp, Artificial Sequence
  chemically synthesized
agagattgtctatttatacc

SEQ ID NO: 55875 - DNA, 20 bp, Artificial Sequence
  chemically synthesized
gagattgtctatttatacca

SEQ ID NO: 55876 - DNA, 20 bp, Artificial Sequence
  chemically synthesized
ataccagggatacaaaatta

SEQ ID NO: 55877 - DNA, 20 bp, Artificial Sequence
  chemically synthesized
cagttctgacttaacgtgtg

SEQ ID NO: 55878 - DNA, 20 bp, Artificial Sequence
  chemically synthesized
tctgacttaacgtgtgaggt

SEQ ID NO: 55879 - DNA, 20 bp, Artificial Sequence
  chemically synthesized
ctgacttaacgtgtgaggtt

SEQ ID NO: 55880 - DNA, 20 bp, Artificial Sequence
  chemically synthesized
tcaaagaacttctgtgaata

SEQ ID NO: 55881 - DNA, 20 bp, Artificial Sequence
  chemically synthesized
tgaataaggtatcagagacc

SEQ ID NO: 55882 - DNA, 20 bp, Artificial Sequence
  chemically synthesized
agacctggcatgagattttg

SEQ ID NO: 55883 - DNA, 20 bp, Artificial Sequence
  chemically synthesized
ttgactcccatttctacaaa

SEQ ID NO: 55884 - DNA, 20 bp, Artificial Sequence
  chemically synthesized
tcttctgctgcctacaaacc

SEQ ID NO: 55885 - DNA, 20 bp, Artificial Sequence
  chemically synthesized
gtaaatttacatcatttttg

SEQ ID NO: 55886 - DNA, 20 bp, Artificial Sequence
  chemically synthesized
gcatttgccctgtctccaac

SEQ ID NO: 55887 - DNA, 20 bp, Artificial Sequence
  chemically synthesized
catttgccctgtctccaaca

SEQ ID NO: 55888 - DNA, 20 bp, Artificial Sequence
  chemically synthesized
ccaacagggcactttcaata

SEQ ID NO: 55889 - DNA, 20 bp, Artificial Sequence
  chemically synthesized
accaagcagtcactttcatt

SEQ ID NO: 55890 - DNA, 20 bp, Artificial Sequence
  chemically synthesized
attaggttttgcaatttatg

SEQ ID NO: 55891 - DNA, 20 bp, Artificial Sequence
  chemically synthesized
ccatccttttatgtgtcttt

SEQ ID NO: 55892 - DNA, 20 bp, Artificial Sequence
  chemically synthesized
cagtatgattgacatgtagc

SEQ ID NO: 55893 - DNA, 20 bp, Artificial Sequence
  chemically synthesized
ctttccataaatgcctatca

SEQ ID NO: 55894 - DNA, 20 bp, Artificial Sequence
  chemically synthesized
tccataaatgcctatcaagg

SEQ ID NO: 55895 - DNA, 20 bp, Artificial Sequence
  chemically synthesized
ataaatgcctatcaaggagg

SEQ ID NO: 55896 - DNA, 20 bp, Artificial Sequence
  chemically synthesized
atgcctatcaaggaggtgga

SEQ ID NO: 55897 - DNA, 20 bp, Artificial Sequence
  chemically synthesized
ggaggtggaaggaatgctta

SEQ ID NO: 55898 - DNA, 20 bp, Artificial Sequence
  chemically synthesized
ttgaaaattgcaaaagcact

SEQ ID NO: 55899 - DNA, 20 bp, Artificial Sequence
  chemically synthesized
aaaagcactaggcaaaccta

SEQ ID NO: 55900 - DNA, 20 bp, Artificial Sequence
  chemically synthesized
aaagcactaggcaaacctaa

SEQ ID NO: 55901 - DNA, 20 bp, Artificial Sequence
  chemically synthesized
taggcaaacctaagggatta

SEQ ID NO: 55902 - DNA, 20 bp, Artificial Sequence
  chemically synthesized
ggcattgtatttattactgc

SEQ ID NO: 55903 - DNA, 20 bp, Artificial Sequence
  chemically synthesized
atttattactgctggtgcag

SEQ ID NO: 55904 - DNA, 20 bp, Artificial Sequence
  chemically synthesized
tggtgcagaggagagcactt

SEQ ID NO: 55905 - DNA, 20 bp, Artificial Sequence
  chemically synthesized
cattcacctgaagaataaga

SEQ ID NO: 55906 - DNA, 20 bp, Artificial Sequence
  chemically synthesized
gtcctttaagccaacagata

SEQ ID NO: 55907 - DNA, 20 bp, Artificial Sequence
  chemically synthesized
tgtgcagcatctgccctttg

SEQ ID NO: 55908 - DNA, 20 bp, Artificial Sequence
  chemically synthesized
ttgtggttctgtgaacagcc

SEQ ID NO: 55909 - DNA, 20 bp, Artificial Sequence
  chemically synthesized
tgtggttctgtgaacagcca

SEQ ID NO: 55910 - DNA, 20 bp, Artificial Sequence
  chemically synthesized
ttctgtgaacagccagggtt

SEQ ID NO: 55911 - DNA, 20 bp, Artificial Sequence
  chemically synthesized
tgtgaacagccagggtttgg

SEQ ID NO: 55912 - DNA, 20 bp, Artificial Sequence
  chemically synthesized
agccagggtttggaggcctg

SEQ ID NO: 55913 - DNA, 20 bp, Artificial Sequence
  chemically synthesized
gccagggtttggaggcctgt

SEQ ID NO: 55914 - DNA, 20 bp, Artificial Sequence
  chemically synthesized
gtttggaggcctgtgggaga

SEQ ID NO: 55915 - DNA, 20 bp, Artificial Sequence
  chemically synthesized
tttggaggcctgtgggagat

SEQ ID NO: 55916 - DNA, 20 bp, Artificial Sequence
  chemically synthesized
aagtcagtctagaccaagaa

SEQ ID NO: 55917 - DNA, 20 bp, Artificial Sequence
  chemically synthesized
ctctttctccctgaagtttg

SEQ ID NO: 55918 - DNA, 20 bp, Artificial Sequence
  chemically synthesized
tttgtggcagcctctattgc

SEQ ID NO: 55919 - DNA, 20 bp, Artificial Sequence
  chemically synthesized
gcctctattgctggagaact

SEQ ID NO: 55920 - DNA, 20 bp, Artificial Sequence
  chemically synthesized
cctctattgctggagaactt

SEQ ID NO: 55921 - DNA, 20 bp, Artificial Sequence
  chemically synthesized
tggagaacttgggacaattt

SEQ ID NO: 55922 - DNA, 20 bp, Artificial Sequence
  chemically synthesized
ggagaacttgggacaattta

SEQ ID NO: 55923 - DNA, 20 bp, Artificial Sequence
  chemically synthesized
gacaatttagggatgaattt

SEQ ID NO: 55924 - DNA, 20 bp, Artificial Sequence
  chemically synthesized
atttagggatgaatttaggt

SEQ ID NO: 55925 - DNA, 20 bp, Artificial Sequence
  chemically synthesized
tttagggatgaatttaggtt

SEQ ID NO: 55926 - DNA, 20 bp, Artificial Sequence
  chemically synthesized
ttagggatgaatttaggttg

SEQ ID NO: 55927 - DNA, 20 bp, Artificial Sequence
  chemically synthesized
tggggtagtgtctatacaca

SEQ ID NO: 55928 - DNA, 20 bp, Artificial Sequence
  chemically synthesized
ggggtagtgtctatacacat

SEQ ID NO: 55929 - DNA, 20 bp, Artificial Sequence
  chemically synthesized
gtagtgtctatacacatggg

SEQ ID NO: 55930 - DNA, 20 bp, Artificial Sequence
  chemically synthesized
tagtgtctatacacatggga

SEQ ID NO: 55931 - DNA, 20 bp, Artificial Sequence
  chemically synthesized
agtgtctatacacatgggag

SEQ ID NO: 55932 - DNA, 20 bp, Artificial Sequence
  chemically synthesized
cgtcaaacgtacccatgtcc

SEQ ID NO: 55933 - DNA, 20 bp, Artificial Sequence
  chemically synthesized
gtcaaacgtacccatgtcca

SEQ ID NO: 55934 - DNA, 20 bp, Artificial Sequence
  chemically synthesized
gacagtttcctctgagatca

SEQ ID NO: 55935 - DNA, 20 bp, Artificial Sequence
  chemically synthesized
gtttcctctgagatcatgga

SEQ ID NO: 55936 - DNA, 20 bp, Artificial Sequence
  chemically synthesized
agatcatggacggatgcagt

SEQ ID NO: 55937 - DNA, 20 bp, Artificial Sequence
  chemically synthesized
gatcatggacggatgcagtt

SEQ ID NO: 55938 - DNA, 20 bp, Artificial Sequence
  chemically synthesized
catggacggatgcagttggg

SEQ ID NO: 55939 - DNA, 20 bp, Artificial Sequence
  chemically synthesized
cagcaagagaatcactgtct

SEQ ID NO: 55940 - DNA, 20 bp, Artificial Sequence
  chemically synthesized
ttcagaaaaatgaaaccaaa

SEQ ID NO: 55941 - DNA, 20 bp, Artificial Sequence
  chemically synthesized
tcagaaaaatgaaaccaaat

SEQ ID NO: 55942 - DNA, 20 bp, Artificial Sequence
  chemically synthesized
atgaaaccaaatgggcttca

SEQ ID NO: 55943 - DNA, 20 bp, Artificial Sequence
  chemically synthesized
ttctttaccttcttttgaca

SEQ ID NO: 55944 - DNA, 20 bp, Artificial Sequence
  chemically synthesized
ttaccttcttttgacatggc

SEQ ID NO: 55945 - DNA, 20 bp, Artificial Sequence
  chemically synthesized
tcttttgacatggctggtca

SEQ ID NO: 55946 - DNA, 20 bp, Artificial Sequence
  chemically synthesized
cttttgacatggctggtcat

SEQ ID NO: 55947 - DNA, 20 bp, Artificial Sequence
  chemically synthesized
tatgtatgttcacatttgtc

SEQ ID NO: 55948 - DNA, 20 bp, Artificial Sequence
  chemically synthesized
atgtatgttcacatttgtct

SEQ ID NO: 55949 - DNA, 20 bp, Artificial Sequence
  chemically synthesized
tgtatgttcacatttgtctg

SEQ ID NO: 55950 - DNA, 20 bp, Artificial Sequence
  chemically synthesized
ctagtttttgctcattgtcc

SEQ ID NO: 55951 - DNA, 20 bp, Artificial Sequence
  chemically synthesized
gtttttgctcattgtcccgg

SEQ ID NO: 55952 - DNA, 20 bp, Artificial Sequence
  chemically synthesized
tttttgctcattgtcccgga

SEQ ID NO: 55953 - DNA, 20 bp, Artificial Sequence
  chemically synthesized
ctttccaaactgactcagtt

SEQ ID NO: 55954 - DNA, 20 bp, Artificial Sequence
  chemically synthesized
gtttggatcataaattatct

SEQ ID NO: 55955 - DNA, 20 bp, Artificial Sequence
  chemically synthesized
accctgttactagtgacgtt

SEQ ID NO: 55956 - DNA, 20 bp, Artificial Sequence
  chemically synthesized
tgacgtttggcactcaagaa

SEQ ID NO: 55957 - DNA, 20 bp, Artificial Sequence
  chemically synthesized
gacgtttggcactcaagaat

SEQ ID NO: 55958 - DNA, 20 bp, Artificial Sequence
  chemically synthesized
acgtttggcactcaagaatg

SEQ ID NO: 55959 - DNA, 20 bp, Artificial Sequence
  chemically synthesized
gcagtcctcagtgaagagaa

SEQ ID NO: 55960 - DNA, 20 bp, Artificial Sequence
  chemically synthesized
tcagtgaagagaaaggcaca

SEQ ID NO: 55961 - DNA, 20 bp, Artificial Sequence
  chemically synthesized
aagagaaaggcacatggctc

SEQ ID NO: 55962 - DNA, 20 bp, Artificial Sequence
  chemically synthesized
agagaaaggcacatggctca

SEQ ID NO: 55963 - DNA, 20 bp, Artificial Sequence
  chemically synthesized
gactcccagccatcatatct

SEQ ID NO: 55964 - DNA, 20 bp, Artificial Sequence
  chemically synthesized
ccttcactgtgtgaacaact

SEQ ID NO: 55965 - DNA, 20 bp, Artificial Sequence
  chemically synthesized
agtaattgcacacacctccc

SEQ ID NO: 55966 - DNA, 20 bp, Artificial Sequence
  chemically synthesized
cacctcccaggattattgtc

SEQ ID NO: 55967 - DNA, 20 bp, Artificial Sequence
  chemically synthesized
tcccaggattattgtcagga

SEQ ID NO: 55968 - DNA, 20 bp, Artificial Sequence
  chemically synthesized
tgtcaggatggagtgagaca

SEQ ID NO: 55969 - DNA, 20 bp, Artificial Sequence
  chemically synthesized
gcagagcacttgcaaagcac

SEQ ID NO: 55970 - DNA, 20 bp, Artificial Sequence
  chemically synthesized
tatatattaaatcctaataa

SEQ ID NO: 55971 - DNA, 20 bp, Artificial Sequence
  chemically synthesized
tttttaaatagctgaatcat

SEQ ID NO: 55972 - DNA, 20 bp, Artificial Sequence
  chemically synthesized
ttttaaatagctgaatcatt

SEQ ID NO: 55973 - DNA, 20 bp, Artificial Sequence
  chemically synthesized
accttgtgaccaaatccaca

SEQ ID NO: 55974 - DNA, 20 bp, Artificial Sequence
  chemically synthesized
caaatccacatggtagaagc

SEQ ID NO: 55975 - DNA, 20 bp, Artificial Sequence
  chemically synthesized
tgttgagtgccactgaactc

SEQ ID NO: 55976 - DNA, 20 bp, Artificial Sequence
  chemically synthesized
gccactgaactcaggaagag

SEQ ID NO: 55977 - DNA, 20 bp, Artificial Sequence
  chemically synthesized
gaatcttgcagactgtgtag

SEQ ID NO: 55978 - DNA, 20 bp, Artificial Sequence
  chemically synthesized
aatcttgcagactgtgtagt

SEQ ID NO: 55979 - DNA, 20 bp, Artificial Sequence
  chemically synthesized
atcttgcagactgtgtagtg

SEQ ID NO: 55980 - DNA, 20 bp, Artificial Sequence
  chemically synthesized
tttgtcttctctgtgctgtg

SEQ ID NO: 55981 - DNA, 20 bp, Artificial Sequence
  chemically synthesized
ttgtcttctctgtgctgtga

SEQ ID NO: 55982 - DNA, 20 bp, Artificial Sequence
  chemically synthesized
tctgtgctgtgagggagact

SEQ ID NO: 55983 - DNA, 20 bp, Artificial Sequence
  chemically synthesized
taaatcatctttgtcgctca

SEQ ID NO: 55984 - DNA, 20 bp, Artificial Sequence
  chemically synthesized
cgctcacggtaagttcagtc

SEQ ID NO: 55985 - DNA, 20 bp, Artificial Sequence
  chemically synthesized
gctcacggtaagttcagtct

SEQ ID NO: 55986 - DNA, 20 bp, Artificial Sequence
  chemically synthesized
ctgggtttcttacacttcac

SEQ ID NO: 55987 - DNA, 20 bp, Artificial Sequence
  chemically synthesized
ttcttacacttcactggttt

SEQ ID NO: 55988 - DNA, 20 bp, Artificial Sequence
  chemically synthesized
tcactggttttggtagaagc

SEQ ID NO: 55989 - DNA, 20 bp, Artificial Sequence
  chemically synthesized
gttttggtagaagctggaca

SEQ ID NO: 55990 - DNA, 20 bp, Artificial Sequence
  chemically synthesized
cttcttcttgatttgatccc

SEQ ID NO: 55991 - DNA, 20 bp, Artificial Sequence
  chemically synthesized
ttcttcttgatttgatccca

SEQ ID NO: 55992 - DNA, 20 bp, Artificial Sequence
  chemically synthesized
tgatcccagggaagtaagaa

SEQ ID NO: 55993 - DNA, 20 bp, Artificial Sequence
  chemically synthesized
gatcccagggaagtaagaat

SEQ ID NO: 55994 - DNA, 20 bp, Artificial Sequence
  chemically synthesized
atgggctgaccctgagcaac

SEQ ID NO: 55995 - DNA, 20 bp, Artificial Sequence
  chemically synthesized
tgggctgaccctgagcaact

SEQ ID NO: 55996 - DNA, 20 bp, Artificial Sequence
  chemically synthesized
gagcaactgggttcaatgtc

SEQ ID NO: 55997 - DNA, 20 bp, Artificial Sequence
  chemically synthesized
tcaatgtcaggattccagat

SEQ ID NO: 55998 - DNA, 20 bp, Artificial Sequence
  chemically synthesized
attccagattggagagaaaa

SEQ ID NO: 55999 - DNA, 20 bp, Artificial Sequence
  chemically synthesized
ccagattggagagaaaatgg

SEQ ID NO: 56000 - DNA, 20 bp, Artificial Sequence
  chemically synthesized
cagattggagagaaaatgga

SEQ ID NO: 56001 - DNA, 20 bp, Artificial Sequence
  chemically synthesized
agattggagagaaaatggag

SEQ ID NO: 56002 - DNA, 20 bp, Artificial Sequence
  chemically synthesized
gattggagagaaaatggagg

SEQ ID NO: 56003 - DNA, 20 bp, Artificial Sequence
  chemically synthesized
gcgtgctgtttgtagtccca

SEQ ID NO: 56004 - DNA, 20 bp, Artificial Sequence
  chemically synthesized
ttgtagtcccaaggctaagc

SEQ ID NO: 56005 - DNA, 20 bp, Artificial Sequence
  chemically synthesized
tagtcccaaggctaagcagg

SEQ ID NO: 56006 - DNA, 20 bp, Artificial Sequence
  chemically synthesized
caaggctaagcaggaggtcc

SEQ ID NO: 56007 - DNA, 20 bp, Artificial Sequence
  chemically synthesized
aggaggtcctggtacacatg

SEQ ID NO: 56008 - DNA, 20 bp, Artificial Sequence
  chemically synthesized
tgccactctccctgcagtct

SEQ ID NO: 56009 - DNA, 20 bp, Artificial Sequence
  chemically synthesized
gccactctccctgcagtcta

SEQ ID NO: 56010 - DNA, 20 bp, Artificial Sequence
  chemically synthesized
ctccctgcagtctagggacc

SEQ ID NO: 56011 - DNA, 20 bp, Artificial Sequence
  chemically synthesized
gcagtctagggacctggaag

SEQ ID NO: 56012 - DNA, 20 bp, Artificial Sequence
  chemically synthesized
gacctggaagaggagagaat

SEQ ID NO: 56013 - DNA, 20 bp, Artificial Sequence
  chemically synthesized
acctggaagaggagagaata

SEQ ID NO: 56014 - DNA, 20 bp, Artificial Sequence
  chemically synthesized
cctggaagaggagagaatag

SEQ ID NO: 56015 - DNA, 20 bp, Artificial Sequence
  chemically synthesized
atgcactgacattcccagcc

SEQ ID NO: 56016 - DNA, 20 bp, Artificial Sequence
  chemically synthesized
cattcccagccaggcatgtg

SEQ ID NO: 56017 - DNA, 20 bp, Artificial Sequence
  chemically synthesized
attcccagccaggcatgtga

SEQ ID NO: 56018 - DNA, 20 bp, Artificial Sequence
  chemically synthesized
gaatctcttccaaagctttc

SEQ ID NO: 56019 - DNA, 20 bp, Artificial Sequence
  chemically synthesized
gtgatgactacatcctcaga

SEQ ID NO: 56020 - DNA, 20 bp, Artificial Sequence
  chemically synthesized
tgatgactacatcctcagat

SEQ ID NO: 56021 - DNA, 20 bp, Artificial Sequence
  chemically synthesized
tacatcctcagatgggcagt

SEQ ID NO: 56022 - DNA, 20 bp, Artificial Sequence
  chemically synthesized
acatcctcagatgggcagtt

SEQ ID NO: 56023 - DNA, 20 bp, Artificial Sequence
  chemically synthesized
catcctcagatgggcagttg

SEQ ID NO: 56024 - DNA, 20 bp, Artificial Sequence
  chemically synthesized
tcagattcttctagttgctg

SEQ ID NO: 56025 - DNA, 20 bp, Artificial Sequence
  chemically synthesized
tgtcatccaccctatgaatc

SEQ ID NO: 56026 - DNA, 20 bp, Artificial Sequence
  chemically synthesized
ccctatgaatctggcagtcc

SEQ ID NO: 56027 - DNA, 20 bp, Artificial Sequence
  chemically synthesized
tggcagtccaggaaactttc

SEQ ID NO: 56028 - DNA, 20 bp, Artificial Sequence
  chemically synthesized
tttaaattctgcacagaaaa

SEQ ID NO: 56029 - DNA, 20 bp, Artificial Sequence
  chemically synthesized
tctgcacagaaaaaggagaa

SEQ ID NO: 56030 - DNA, 20 bp, Artificial Sequence
  chemically synthesized
ctgcacagaaaaaggagaaa

SEQ ID NO: 56031 - DNA, 20 bp, Artificial Sequence
  chemically synthesized
aaggagaaagggtattaaga

SEQ ID NO: 56032 - DNA, 20 bp, Artificial Sequence
  chemically synthesized
caccatcaaatgttcagttc

SEQ ID NO: 56033 - DNA, 20 bp, Artificial Sequence
  chemically synthesized
caaatgttcagttcaggagt

SEQ ID NO: 56034 - DNA, 20 bp, Artificial Sequence
  chemically synthesized
ggtctatagagttttctgac

SEQ ID NO: 56035 - DNA, 20 bp, Artificial Sequence
  chemically synthesized
gtctatagagttttctgaca

SEQ ID NO: 56036 - DNA, 20 bp, Artificial Sequence
  chemically synthesized
attgccagcatgttcctcaa

SEQ ID NO: 56037 - DNA, 20 bp, Artificial Sequence
  chemically synthesized
ctcaatggactctttgcttc

SEQ ID NO: 56038 - DNA, 20 bp, Artificial Sequence
  chemically synthesized
tcaagacttgaagtgaccac

SEQ ID NO: 56039 - DNA, 20 bp, Artificial Sequence
  chemically synthesized
tggctgtgccctccagcccc

SEQ ID NO: 56040 - DNA, 20 bp, Artificial Sequence
  chemically synthesized
ggctgtgccctccagcccca

SEQ ID NO: 56041 - DNA, 20 bp, Artificial Sequence
  chemically synthesized
ttcagttccctactgcagct

SEQ ID NO: 56042 - DNA, 20 bp, Artificial Sequence
  chemically synthesized
tcagttccctactgcagcta

SEQ ID NO: 56043 - DNA, 20 bp, Artificial Sequence
  chemically synthesized
cctactgcagctagggtctt

SEQ ID NO: 56044 - DNA, 20 bp, Artificial Sequence
  chemically synthesized
actgcagctagggtcttagg

SEQ ID NO: 56045 - DNA, 20 bp, Artificial Sequence
  chemically synthesized
ctgcagctagggtcttagga

SEQ ID NO: 56046 - DNA, 20 bp, Artificial Sequence
  chemically synthesized
ttaggagggaccctagttac

SEQ ID NO: 56047 - DNA, 20 bp, Artificial Sequence
  chemically synthesized
aggatgaatcaaataccaaa

SEQ ID NO: 56048 - DNA, 20 bp, Artificial Sequence
  chemically synthesized
gaatcaaataccaaaaggtg

SEQ ID NO: 56049 - DNA, 20 bp, Artificial Sequence
  chemically synthesized
ggttcaactgttccttgtcc

SEQ ID NO: 56050 - DNA, 20 bp, Artificial Sequence
  chemically synthesized
ttgtcctggaatatcattct

SEQ ID NO: 56051 - DNA, 20 bp, Artificial Sequence
  chemically synthesized
ggaatatcattcttggccac

SEQ ID NO: 56052 - DNA, 20 bp, Artificial Sequence
  chemically synthesized
gaatatcattcttggccact

SEQ ID NO: 56053 - DNA, 20 bp, Artificial Sequence
  chemically synthesized
ccaaaaacactcacttttct

SEQ ID NO: 56054 - DNA, 20 bp, Artificial Sequence
  chemically synthesized
ttccagagtcttcttatgat

SEQ ID NO: 56055 - DNA, 20 bp, Artificial Sequence
  chemically synthesized
tccagagtcttcttatgatc

SEQ ID NO: 56056 - DNA, 20 bp, Artificial Sequence
  chemically synthesized
ccagagtcttcttatgatcg

SEQ ID NO: 56057 - DNA, 20 bp, Artificial Sequence
  chemically synthesized
cttcttatgatcggggagac

SEQ ID NO: 56058 - DNA, 20 bp, Artificial Sequence
  chemically synthesized
ttcttatgatcggggagact

SEQ ID NO: 56059 - DNA, 20 bp, Artificial Sequence
  chemically synthesized
gggagactgggccatacgat

SEQ ID NO: 56060 - DNA, 20 bp, Artificial Sequence
  chemically synthesized
acattgatagatgaagtgaa

SEQ ID NO: 56061 - DNA, 20 bp, Artificial Sequence
  chemically synthesized
atagatgaagtgaatggcag

SEQ ID NO: 56062 - DNA, 20 bp, Artificial Sequence
  chemically synthesized
tagatgaagtgaatggcaga

SEQ ID NO: 56063 - DNA, 20 bp, Artificial Sequence
  chemically synthesized
aagtgaatggcagagggcac

SEQ ID NO: 56064 - DNA, 20 bp, Artificial Sequence
  chemically synthesized
cttcccacttattctgagct

SEQ ID NO: 56065 - DNA, 20 bp, Artificial Sequence
  chemically synthesized
gaagaacagatttctagtct

SEQ ID NO: 56066 - DNA, 20 bp, Artificial Sequence
  chemically synthesized
gtcttggctctaacacaatt

SEQ ID NO: 56067 - DNA, 20 bp, Artificial Sequence
  chemically synthesized
ttggctctaacacaattagg

SEQ ID NO: 56068 - DNA, 20 bp, Artificial Sequence
  chemically synthesized
tggctctaacacaattaggt

SEQ ID NO: 56069 - DNA, 20 bp, Artificial Sequence
  chemically synthesized
cacaattaggtgggtgacca

SEQ ID NO: 56070 - DNA, 20 bp, Artificial Sequence
  chemically synthesized
ggtgaccatggtcaagagac

SEQ ID NO: 56071 - DNA, 20 bp, Artificial Sequence
  chemically synthesized
gtcaagagactggctttctc

SEQ ID NO: 56072 - DNA, 20 bp, Artificial Sequence
  chemically synthesized
tcaagagactggctttctct

SEQ ID NO: 56073 - DNA, 20 bp, Artificial Sequence
  chemically synthesized
gactggctttctctgggcct

SEQ ID NO: 56074 - DNA, 20 bp, Artificial Sequence
  chemically synthesized
actggctttctctgggcctc

SEQ ID NO: 56075 - DNA, 20 bp, Artificial Sequence
  chemically synthesized
ctggctttctctgggcctcg

SEQ ID NO: 56076 - DNA, 20 bp, Artificial Sequence
  chemically synthesized
ctcggggccctatcaattca

SEQ ID NO: 56077 - DNA, 20 bp, Artificial Sequence
  chemically synthesized
ggggccctatcaattcaagg

SEQ ID NO: 56078 - DNA, 20 bp, Artificial Sequence
  chemically synthesized
gggccctatcaattcaagga

SEQ ID NO: 56079 - DNA, 20 bp, Artificial Sequence
  chemically synthesized
ggccctatcaattcaaggag

SEQ ID NO: 56080 - DNA, 20 bp, Artificial Sequence
  chemically synthesized
ctatcaattcaaggaggggt

SEQ ID NO: 56081 - DNA, 20 bp, Artificial Sequence
  chemically synthesized
acatgacaataatatacctc

SEQ ID NO: 56082 - DNA, 20 bp, Artificial Sequence
  chemically synthesized
catgacaataatatacctct

SEQ ID NO: 56083 - DNA, 20 bp, Artificial Sequence
  chemically synthesized
cctctgggaaaaagccctag

SEQ ID NO: 56084 - DNA, 20 bp, Artificial Sequence
  chemically synthesized
ctctgggaaaaagccctaga

SEQ ID NO: 56085 - DNA, 20 bp, Artificial Sequence
  chemically synthesized
gggaaaaagccctagaggga

SEQ ID NO: 56086 - DNA, 20 bp, Artificial Sequence
  chemically synthesized
cctagagggaaggaacacca

SEQ ID NO: 56087 - DNA, 20 bp, Artificial Sequence
  chemically synthesized
aaggaacaccaaggcttgca

SEQ ID NO: 56088 - DNA, 20 bp, Artificial Sequence
  chemically synthesized
gaacaccaaggcttgcaagg

SEQ ID NO: 56089 - DNA, 20 bp, Artificial Sequence
  chemically synthesized
ggcttgcaaggaggtaattt

SEQ ID NO: 56090 - DNA, 20 bp, Artificial Sequence
  chemically synthesized
aggtaattttggtgcagcta

SEQ ID NO: 56091 - DNA, 20 bp, Artificial Sequence
  chemically synthesized
ctctttactgacagcaactc

SEQ ID NO: 56092 - DNA, 20 bp, Artificial Sequence
  chemically synthesized
gcaactctggcagctaattt

SEQ ID NO: 56093 - DNA, 20 bp, Artificial Sequence
  chemically synthesized
actctggcagctaattttgg

SEQ ID NO: 56094 - DNA, 20 bp, Artificial Sequence
  chemically synthesized
gcagctaattttggtggaag

SEQ ID NO: 56095 - DNA, 20 bp, Artificial Sequence
  chemically synthesized
cagctaattttggtggaagt

SEQ ID NO: 56096 - DNA, 20 bp, Artificial Sequence
  chemically synthesized
agctaattttggtggaagtg

SEQ ID NO: 56097 - DNA, 20 bp, Artificial Sequence
  chemically synthesized
gctaattttggtggaagtgg

SEQ ID NO: 56098 - DNA, 20 bp, Artificial Sequence
  chemically synthesized
ggaatattttcaaattaccc

SEQ ID NO: 56099 - DNA, 20 bp, Artificial Sequence
  chemically synthesized
gaatattttcaaattaccca

SEQ ID NO: 56100 - DNA, 20 bp, Artificial Sequence
  chemically synthesized
gaaattgcttagtactttcc

SEQ ID NO: 56101 - DNA, 20 bp, Artificial Sequence
  chemically synthesized
caggcagtacttttcaaatt

SEQ ID NO: 56102 - DNA, 20 bp, Artificial Sequence
  chemically synthesized
aggcagtacttttcaaatta

SEQ ID NO: 56103 - DNA, 20 bp, Artificial Sequence
  chemically synthesized
aattagggtatttgtaatcc

SEQ ID NO: 56104 - DNA, 20 bp, Artificial Sequence
  chemically synthesized
attagggtatttgtaatcct

SEQ ID NO: 56105 - DNA, 20 bp, Artificial Sequence
  chemically synthesized
ttagggtatttgtaatcctg

SEQ ID NO: 56106 - DNA, 20 bp, Artificial Sequence
  chemically synthesized
ggatatgtagccttctgcca

SEQ ID NO: 56107 - DNA, 20 bp, Artificial Sequence
  chemically synthesized
gatatgtagccttctgccaa

SEQ ID NO: 56108 - DNA, 20 bp, Artificial Sequence
  chemically synthesized
aaacaaacatagccttagca

SEQ ID NO: 56109 - DNA, 20 bp, Artificial Sequence
  chemically synthesized
tgtgcatttgccatgaatga

SEQ ID NO: 56110 - DNA, 20 bp, Artificial Sequence
  chemically synthesized
tgatggcttctgcaaccttt

SEQ ID NO: 56111 - DNA, 20 bp, Artificial Sequence
  chemically synthesized
ctgcaacctttaggagatac

SEQ ID NO: 56112 - DNA, 20 bp, Artificial Sequence
  chemically synthesized
gagatactggaagaaaagct

SEQ ID NO: 56113 - DNA, 20 bp, Artificial Sequence
  chemically synthesized
agatactggaagaaaagctt

SEQ ID NO: 56114 - DNA, 20 bp, Artificial Sequence
  chemically synthesized
gcttgggaaacattgcatta

SEQ ID NO: 56115 - DNA, 20 bp, Artificial Sequence
  chemically synthesized
gcattacggaattcttactt

SEQ ID NO: 56116 - DNA, 20 bp, Artificial Sequence
  chemically synthesized
cattacggaattcttacttt

SEQ ID NO: 56117 - DNA, 20 bp, Artificial Sequence
  chemically synthesized
attacggaattcttactttg

SEQ ID NO: 56118 - DNA, 20 bp, Artificial Sequence
  chemically synthesized
gcctcttatgaaattaactg

SEQ ID NO: 56119 - DNA, 20 bp, Artificial Sequence
  chemically synthesized
ttaactgtggaaattcgctg

SEQ ID NO: 56120 - DNA, 20 bp, Artificial Sequence
  chemically synthesized
gaaattcgctgaggatagat

SEQ ID NO: 56121 - DNA, 20 bp, Artificial Sequence
  chemically synthesized
aaattcgctgaggatagata

SEQ ID NO: 56122 - DNA, 20 bp, Artificial Sequence
  chemically synthesized
ctgaggatagatagggatac

SEQ ID NO: 56123 - DNA, 20 bp, Artificial Sequence
  chemically synthesized
tgaggatagatagggatact

SEQ ID NO: 56124 - DNA, 20 bp, Artificial Sequence
  chemically synthesized
aaatgccttaatcccctttg

SEQ ID NO: 56125 - DNA, 20 bp, Artificial Sequence
  chemically synthesized
gtggttttctcatcaataaa

SEQ ID NO: 56126 - DNA, 20 bp, Artificial Sequence
  chemically synthesized
tggttttctcatcaataaat

SEQ ID NO: 56127 - DNA, 20 bp, Artificial Sequence
  chemically synthesized
ggttttctcatcaataaatg

SEQ ID NO: 56128 - DNA, 20 bp, Artificial Sequence
  chemically synthesized
ccctctttattagttgaaga

SEQ ID NO: 56129 - DNA, 20 bp, Artificial Sequence
  chemically synthesized
cctttttttccataacacac

SEQ ID NO: 56130 - DNA, 20 bp, Artificial Sequence
  chemically synthesized
gaaaaaactcaaaatgctga

SEQ ID NO: 56131 - DNA, 20 bp, Artificial Sequence
  chemically synthesized
atgctgatggttagtaagat

SEQ ID NO: 56132 - DNA, 20 bp, Artificial Sequence
  chemically synthesized
aagataggatccatctcccc

SEQ ID NO: 56133 - DNA, 20 bp, Artificial Sequence
  chemically synthesized
tggaaagcaagaatagattg

SEQ ID NO: 56134 - DNA, 20 bp, Artificial Sequence
  chemically synthesized
agcattcagtagccatgcag

SEQ ID NO: 56135 - DNA, 20 bp, Artificial Sequence
  chemically synthesized
gcattcagtagccatgcagt

SEQ ID NO: 56136 - DNA, 20 bp, Artificial Sequence
  chemically synthesized
cattcagtagccatgcagtg

SEQ ID NO: 56137 - DNA, 20 bp, Artificial Sequence
  chemically synthesized
attcagtagccatgcagtgg

SEQ ID NO: 56138 - DNA, 20 bp, Artificial Sequence
  chemically synthesized
agtagccatgcagtgggggt

SEQ ID NO: 56139 - DNA, 20 bp, Artificial Sequence
  chemically synthesized
gtagccatgcagtgggggta

SEQ ID NO: 56140 - DNA, 20 bp, Artificial Sequence
  chemically synthesized
tgcagtgggggtagggtctc

SEQ ID NO: 56141 - DNA, 20 bp, Artificial Sequence
  chemically synthesized
gcagtgggggtagggtctca

SEQ ID NO: 56142 - DNA, 20 bp, Artificial Sequence
  chemically synthesized
tttgcatttacttagtaatg

SEQ ID NO: 56143 - DNA, 20 bp, Artificial Sequence
  chemically synthesized
ttgcatttacttagtaatgt

SEQ ID NO: 56144 - DNA, 20 bp, Artificial Sequence
  chemically synthesized
agacatatttgacagcttta

SEQ ID NO: 56145 - DNA, 20 bp, Artificial Sequence
  chemically synthesized
catatttgacagctttatgg

SEQ ID NO: 56146 - DNA, 20 bp, Artificial Sequence
  chemically synthesized
atatttgacagctttatgga

SEQ ID NO: 56147 - DNA, 20 bp, Artificial Sequence
  chemically synthesized
acagctttatggagggattt

SEQ ID NO: 56148 - DNA, 20 bp, Artificial Sequence
  chemically synthesized
tggagggattttggtttaaa

SEQ ID NO: 56149 - DNA, 20 bp, Artificial Sequence
  chemically synthesized
tggtttaaaaggcattgact

SEQ ID NO: 56150 - DNA, 20 bp, Artificial Sequence
  chemically synthesized
ggtttaaaaggcattgactt

SEQ ID NO: 56151 - DNA, 20 bp, Artificial Sequence
  chemically synthesized
aggcattgacttgggtgacc

SEQ ID NO: 56152 - DNA, 20 bp, Artificial Sequence
  chemically synthesized
taaacgtgatctagcatcaa

SEQ ID NO: 56153 - DNA, 20 bp, Artificial Sequence
  chemically synthesized
cccttcttgactttctacca

SEQ ID NO: 56154 - DNA, 20 bp, Artificial Sequence
  chemically synthesized
caaggaaaagaagccagagc

SEQ ID NO: 56155 - DNA, 20 bp, Artificial Sequence
  chemically synthesized
ccagagcaggagatgatgag

SEQ ID NO: 56156 - DNA, 20 bp, Artificial Sequence
  chemically synthesized
cagagcaggagatgatgaga

SEQ ID NO: 56157 - DNA, 20 bp, Artificial Sequence
  chemically synthesized
tcacccctgttgcaaatttt

SEQ ID NO: 56158 - DNA, 20 bp, Artificial Sequence
  chemically synthesized
cacccctgttgcaaatttta

SEQ ID NO: 56159 - DNA, 20 bp, Artificial Sequence
  chemically synthesized
ccctgttgcaaattttaggg

SEQ ID NO: 56160 - DNA, 20 bp, Artificial Sequence
  chemically synthesized
caaagacatcttcatccttc

SEQ ID NO: 56161 - DNA, 20 bp, Artificial Sequence
  chemically synthesized
catcttcatccttctggaaa

SEQ ID NO: 56162 - DNA, 20 bp, Artificial Sequence
  chemically synthesized
ccttctggaaaaggagacat

SEQ ID NO: 56163 - DNA, 20 bp, Artificial Sequence
  chemically synthesized
tgcatacctgacaccaataa

SEQ ID NO: 56164 - DNA, 20 bp, Artificial Sequence
  chemically synthesized
ccaataaaggtgcttcttaa

SEQ ID NO: 56165 - DNA, 20 bp, Artificial Sequence
  chemically synthesized
caataaaggtgcttcttaaa

SEQ ID NO: 56166 - DNA, 20 bp, Artificial Sequence
  chemically synthesized
aataaaggtgcttcttaaag

SEQ ID NO: 56167 - DNA, 20 bp, Artificial Sequence
  chemically synthesized
gccttagagacagcagccat

SEQ ID NO: 56168 - DNA, 20 bp, Artificial Sequence
  chemically synthesized
ccttagagacagcagccatt

SEQ ID NO: 56169 - DNA, 20 bp, Artificial Sequence
  chemically synthesized
cttagagacagcagccattg

SEQ ID NO: 56170 - DNA, 20 bp, Artificial Sequence
  chemically synthesized
acagcagccattggggtccc

SEQ ID NO: 56171 - DNA, 20 bp, Artificial Sequence
  chemically synthesized
attggggtcccaggctaaat

SEQ ID NO: 56172 - DNA, 20 bp, Artificial Sequence
  chemically synthesized
cccaggctaaattggttaac

SEQ ID NO: 56173 - DNA, 20 bp, Artificial Sequence
  chemically synthesized
aattggttaactggacgtag

SEQ ID NO: 56174 - DNA, 20 bp, Artificial Sequence
  chemically synthesized
attggttaactggacgtagt

SEQ ID NO: 56175 - DNA, 20 bp, Artificial Sequence
  chemically synthesized
ggttaactggacgtagtggg

SEQ ID NO: 56176 - DNA, 20 bp, Artificial Sequence
  chemically synthesized
gttaactggacgtagtgggt

SEQ ID NO: 56177 - DNA, 20 bp, Artificial Sequence
  chemically synthesized
ttaactggacgtagtgggtg

SEQ ID NO: 56178 - DNA, 20 bp, Artificial Sequence
  chemically synthesized
gggattttgttcaaaatgta

SEQ ID NO: 56179 - DNA, 20 bp, Artificial Sequence
  chemically synthesized
caaaatgtatggcagcttcc

SEQ ID NO: 56180 - DNA, 20 bp, Artificial Sequence
  chemically synthesized
gcagcttccaggaatacaga

SEQ ID NO: 56181 - DNA, 20 bp, Artificial Sequence
  chemically synthesized
gtactaattctcagctaata

SEQ ID NO: 56182 - DNA, 20 bp, Artificial Sequence
  chemically synthesized
gcttccttgttcttcacaaa

SEQ ID NO: 56183 - DNA, 20 bp, Artificial Sequence
  chemically synthesized
acaaaaggcgcaaagacagc

SEQ ID NO: 56184 - DNA, 20 bp, Artificial Sequence
  chemically synthesized
aagtgtaagagtgccctcca

SEQ ID NO: 56185 - DNA, 20 bp, Artificial Sequence
  chemically synthesized
agtgtaagagtgccctccaa

SEQ ID NO: 56186 - DNA, 20 bp, Artificial Sequence
  chemically synthesized
ccaagggtgtcctattttgc

SEQ ID NO: 56187 - DNA, 20 bp, Artificial Sequence
  chemically synthesized
ttgacatgcaaagcactctg

SEQ ID NO: 56188 - DNA, 20 bp, Artificial Sequence
  chemically synthesized
tgacatgcaaagcactctga

SEQ ID NO: 56189 - DNA, 20 bp, Artificial Sequence
  chemically synthesized
cctgagctattattgatctc

SEQ ID NO: 56190 - DNA, 20 bp, Artificial Sequence
  chemically synthesized
ggagttctgaagtaataact

SEQ ID NO: 56191 - DNA, 20 bp, Artificial Sequence
  chemically synthesized
aagcctttaaaatagtgatc

SEQ ID NO: 56192 - DNA, 20 bp, Artificial Sequence
  chemically synthesized
agcctttaaaatagtgatca

SEQ ID NO: 56193 - DNA, 20 bp, Artificial Sequence
  chemically synthesized
tttaaaatagtgatcaggga

SEQ ID NO: 56194 - DNA, 20 bp, Artificial Sequence
  chemically synthesized
ttaatctcatacattgctgc

SEQ ID NO: 56195 - DNA, 20 bp, Artificial Sequence
  chemically synthesized
tctcatacattgctgccggt

SEQ ID NO: 56196 - DNA, 20 bp, Artificial Sequence
  chemically synthesized
ccggttggagctttctctgc

SEQ ID NO: 56197 - DNA, 20 bp, Artificial Sequence
  chemically synthesized
caggagtgtcagctttgtgc

SEQ ID NO: 56198 - DNA, 20 bp, Artificial Sequence
  chemically synthesized
tagagtgcagttacattctt

SEQ ID NO: 56199 - DNA, 20 bp, Artificial Sequence
  chemically synthesized
gtgcagttacattcttagga

SEQ ID NO: 56200 - DNA, 20 bp, Artificial Sequence
  chemically synthesized
tgcagttacattcttaggat

SEQ ID NO: 56201 - DNA, 20 bp, Artificial Sequence
  chemically synthesized
cattcttaggatgggaaaag

SEQ ID NO: 56202 - DNA, 20 bp, Artificial Sequence
  chemically synthesized
atctcccaaatcatttcaat

SEQ ID NO: 56203 - DNA, 20 bp, Artificial Sequence
  chemically synthesized
tctcccaaatcatttcaatt

SEQ ID NO: 56204 - DNA, 20 bp, Artificial Sequence
  chemically synthesized
gtctcgtatttgttagaata

SEQ ID NO: 56205 - DNA, 20 bp, Artificial Sequence
  chemically synthesized
taaggagctctgatacgtaa

SEQ ID NO: 56206 - DNA, 20 bp, Artificial Sequence
  chemically synthesized
aaggagtcaacagcaaaatt

SEQ ID NO: 56207 - DNA, 20 bp, Artificial Sequence
  chemically synthesized
aggagtcaacagcaaaatta

SEQ ID NO: 56208 - DNA, 20 bp, Artificial Sequence
  chemically synthesized
gacagaatctgagcttataa

SEQ ID NO: 56209 - DNA, 20 bp, Artificial Sequence
  chemically synthesized
cttataaaggatgttgtgag

SEQ ID NO: 56210 - DNA, 20 bp, Artificial Sequence
  chemically synthesized
aaggatgttgtgagtggtca

SEQ ID NO: 56211 - DNA, 20 bp, Artificial Sequence
  chemically synthesized
gatgttgtgagtggtcaagg

SEQ ID NO: 56212 - DNA, 20 bp, Artificial Sequence
  chemically synthesized
caaggaggagagtgaaatga

SEQ ID NO: 56213 - DNA, 20 bp, Artificial Sequence
  chemically synthesized
aaggaggagagtgaaatgat

SEQ ID NO: 56214 - DNA, 20 bp, Artificial Sequence
  chemically synthesized
tgaaatgatgggtcttattc

SEQ ID NO: 56215 - DNA, 20 bp, Artificial Sequence
  chemically synthesized
gggtcttattcaggtgagtt

SEQ ID NO: 56216 - DNA, 20 bp, Artificial Sequence
  chemically synthesized
aggtgagttaggcactgccc

SEQ ID NO: 56217 - DNA, 20 bp, Artificial Sequence
  chemically synthesized
ctctatcctttcacatatta

SEQ ID NO: 56218 - DNA, 20 bp, Artificial Sequence
  chemically synthesized
tctatcctttcacatattaa

SEQ ID NO: 56219 - DNA, 20 bp, Artificial Sequence
  chemically synthesized
ctatcctttcacatattaag

SEQ ID NO: 56220 - DNA, 20 bp, Artificial Sequence
  chemically synthesized
acatattaaggggagatgaa

SEQ ID NO: 56221 - DNA, 20 bp, Artificial Sequence
  chemically synthesized
ttaaggggagatgaaaggtt

SEQ ID NO: 56222 - DNA, 20 bp, Artificial Sequence
  chemically synthesized
gggagatgaaaggttaggtt

SEQ ID NO: 56223 - DNA, 20 bp, Artificial Sequence
  chemically synthesized
gttaggttaggttagtgagc

SEQ ID NO: 56224 - DNA, 20 bp, Artificial Sequence
  chemically synthesized
ccatctatcagctgtttatg

SEQ ID NO: 56225 - DNA, 20 bp, Artificial Sequence
  chemically synthesized
gtcaagattatgtaaacatt

SEQ ID NO: 56226 - DNA, 20 bp, Artificial Sequence
  chemically synthesized
tataatttccttaaatcatc

SEQ ID NO: 56227 - DNA, 20 bp, Artificial Sequence
  chemically synthesized
attttgttgttgttatatga

SEQ ID NO: 56228 - DNA, 20 bp, Artificial Sequence
  chemically synthesized
ttgttgttgttatatgaagg

SEQ ID NO: 56229 - DNA, 20 bp, Artificial Sequence
  chemically synthesized
gttgttatatgaaggtggct

SEQ ID NO: 56230 - DNA, 20 bp, Artificial Sequence
  chemically synthesized
tttttaattaaaacaatttt

SEQ ID NO: 56231 - DNA, 20 bp, Artificial Sequence
  chemically synthesized
taattaaaacaatttttggc

SEQ ID NO: 56232 - DNA, 20 bp, Artificial Sequence
  chemically synthesized
acaatttttggctggcgtgt

SEQ ID NO: 56233 - DNA, 20 bp, Artificial Sequence
  chemically synthesized
tgcctgtaatcccagcactt

SEQ ID NO: 56234 - DNA, 20 bp, Artificial Sequence
  chemically synthesized
gcctgtaatcccagcacttt

SEQ ID NO: 56235 - DNA, 20 bp, Artificial Sequence
  chemically synthesized
tgtaatcccagcactttggg

SEQ ID NO: 56236 - DNA, 20 bp, Artificial Sequence
  chemically synthesized
cccagcactttgggaggctg

SEQ ID NO: 56237 - DNA, 20 bp, Artificial Sequence
  chemically synthesized
agcactttgggaggctgagg

SEQ ID NO: 56238 - DNA, 20 bp, Artificial Sequence
  chemically synthesized
gcactttgggaggctgaggt

SEQ ID NO: 56239 - DNA, 20 bp, Artificial Sequence
  chemically synthesized
tgaggtgggcagatcacctg

SEQ ID NO: 56240 - DNA, 20 bp, Artificial Sequence
  chemically synthesized
tgggcagatcacctgaggtg

SEQ ID NO: 56241 - DNA, 20 bp, Artificial Sequence
  chemically synthesized
tgaggagttcaagaccagcc

SEQ ID NO: 56242 - DNA, 20 bp, Artificial Sequence
  chemically synthesized
caagaccagcctggccaaca

SEQ ID NO: 56243 - DNA, 20 bp, Artificial Sequence
  chemically synthesized
acaaaaatacaaaaattagc

SEQ ID NO: 56244 - DNA, 20 bp, Artificial Sequence
  chemically synthesized
caaaaatacaaaaattagcc

SEQ ID NO: 56245 - DNA, 20 bp, Artificial Sequence
  chemically synthesized
caaaaattagccgggcatga

SEQ ID NO: 56246 - DNA, 20 bp, Artificial Sequence
  chemically synthesized
aaattagccgggcatgatgg

SEQ ID NO: 56247 - DNA, 20 bp, Artificial Sequence
  chemically synthesized
aattagccgggcatgatggc

SEQ ID NO: 56248 - DNA, 20 bp, Artificial Sequence
  chemically synthesized
tggcgggtgcctgtaatcac

SEQ ID NO: 56249 - DNA, 20 bp, Artificial Sequence
  chemically synthesized
tgcctgtaatcacaggtact

SEQ ID NO: 56250 - DNA, 20 bp, Artificial Sequence
  chemically synthesized
gcctgtaatcacaggtactt

SEQ ID NO: 56251 - DNA, 20 bp, Artificial Sequence
  chemically synthesized
tgtaatcacaggtacttggg

SEQ ID NO: 56252 - DNA, 20 bp, Artificial Sequence
  chemically synthesized
aggtacttgggaggctgaga

SEQ ID NO: 56253 - DNA, 20 bp, Artificial Sequence
  chemically synthesized
ggtacttgggaggctgagat

SEQ ID NO: 56254 - DNA, 20 bp, Artificial Sequence
  chemically synthesized
atgggagaattgcttgaacc

SEQ ID NO: 56255 - DNA, 20 bp, Artificial Sequence
  chemically synthesized
tgggagaattgcttgaaccc

SEQ ID NO: 56256 - DNA, 20 bp, Artificial Sequence
  chemically synthesized
gagaattgcttgaacccggg

SEQ ID NO: 56257 - DNA, 20 bp, Artificial Sequence
  chemically synthesized
aattgcttgaacccgggagg

SEQ ID NO: 56258 - DNA, 20 bp, Artificial Sequence
  chemically synthesized
tgcttgaacccgggaggcgg

SEQ ID NO: 56259 - DNA, 20 bp, Artificial Sequence
  chemically synthesized
gaggttgcagtgagccaaga

SEQ ID NO: 56260 - DNA, 20 bp, Artificial Sequence
  chemically synthesized
ggcgccattgcactccaacc

SEQ ID NO: 56261 - DNA, 20 bp, Artificial Sequence
  chemically synthesized
ttttagttaactaattgtcc

SEQ ID NO: 56262 - DNA, 20 bp, Artificial Sequence
  chemically synthesized
ccactaagttgcttttcaat

SEQ ID NO: 56263 - DNA, 20 bp, Artificial Sequence
  chemically synthesized
ttcagatgaataatgaaaga

SEQ ID NO: 56264 - DNA, 20 bp, Artificial Sequence
  chemically synthesized
gatgaataatgaaagatggc

SEQ ID NO: 56265 - DNA, 20 bp, Artificial Sequence
  chemically synthesized
aatgaaagatggcaggatca

SEQ ID NO: 56266 - DNA, 20 bp, Artificial Sequence
  chemically synthesized
atgaaagatggcaggatcaa

SEQ ID NO: 56267 - DNA, 20 bp, Artificial Sequence
  chemically synthesized
aaagatggcaggatcaaggg

SEQ ID NO: 56268 - DNA, 20 bp, Artificial Sequence
  chemically synthesized
aagatggcaggatcaagggt

SEQ ID NO: 56269 - DNA, 20 bp, Artificial Sequence
  chemically synthesized
agatggcaggatcaagggtg

SEQ ID NO: 56270 - DNA, 20 bp, Artificial Sequence
  chemically synthesized
tggcaggatcaagggtgggg

SEQ ID NO: 56271 - DNA, 20 bp, Artificial Sequence
  chemically synthesized
ggcaggatcaagggtggggt

SEQ ID NO: 56272 - DNA, 20 bp, Artificial Sequence
  chemically synthesized
gggtggggtgggtgagtaga

SEQ ID NO: 56273 - DNA, 20 bp, Artificial Sequence
  chemically synthesized
tggggtgggtgagtagaagg

SEQ ID NO: 56274 - DNA, 20 bp, Artificial Sequence
  chemically synthesized
ggggtgggtgagtagaagga

SEQ ID NO: 56275 - DNA, 20 bp, Artificial Sequence
  chemically synthesized
ggtgagtagaaggagggagc

SEQ ID NO: 56276 - DNA, 20 bp, Artificial Sequence
  chemically synthesized
gagtagaaggagggagcagg

SEQ ID NO: 56277 - DNA, 20 bp, Artificial Sequence
  chemically synthesized
gaaggagggagcaggtggtt

SEQ ID NO: 56278 - DNA, 20 bp, Artificial Sequence
  chemically synthesized
aaggagggagcaggtggttt

SEQ ID NO: 56279 - DNA, 20 bp, Artificial Sequence
  chemically synthesized
aggagggagcaggtggtttg

SEQ ID NO: 56280 - DNA, 20 bp, Artificial Sequence
  chemically synthesized
agttgttacatttatgcaag

SEQ ID NO: 56281 - DNA, 20 bp, Artificial Sequence
  chemically synthesized
catcacactgcaaacaaaca

SEQ ID NO: 56282 - DNA, 20 bp, Artificial Sequence
  chemically synthesized
caaacaaacaaggccaatct

SEQ ID NO: 56283 - DNA, 20 bp, Artificial Sequence
  chemically synthesized
caatcttggcctgaaaaaac

SEQ ID NO: 56284 - DNA, 20 bp, Artificial Sequence
  chemically synthesized
acaggacagcaagaataaga

SEQ ID NO: 56285 - DNA, 20 bp, Artificial Sequence
  chemically synthesized
gcaagaataagaaggacttg

SEQ ID NO: 56286 - DNA, 20 bp, Artificial Sequence
  chemically synthesized
tcatctcttcttcatctctg

SEQ ID NO: 56287 - DNA, 20 bp, Artificial Sequence
  chemically synthesized
gtgcagaaagaacagaagtt

SEQ ID NO: 56288 - DNA, 20 bp, Artificial Sequence
  chemically synthesized
agaaagaacagaagttaggt

SEQ ID NO: 56289 - DNA, 20 bp, Artificial Sequence
  chemically synthesized
aagaacagaagttaggttgg

SEQ ID NO: 56290 - DNA, 20 bp, Artificial Sequence
  chemically synthesized
agaacagaagttaggttggt

SEQ ID NO: 56291 - DNA, 20 bp, Artificial Sequence
  chemically synthesized
ttaagagaaatctcataacc

SEQ ID NO: 56292 - DNA, 20 bp, Artificial Sequence
  chemically synthesized
tcctccccaaaataaatttc

SEQ ID NO: 56293 - DNA, 20 bp, Artificial Sequence
  chemically synthesized
cctccccaaaataaatttca

SEQ ID NO: 56294 - DNA, 20 bp, Artificial Sequence
  chemically synthesized
agtaactctcctgattatga

SEQ ID NO: 56295 - DNA, 20 bp, Artificial Sequence
  chemically synthesized
gtaactctcctgattatgaa

SEQ ID NO: 56296 - DNA, 20 bp, Artificial Sequence
  chemically synthesized
tacttcaaaaacaaagacct

SEQ ID NO: 56297 - DNA, 20 bp, Artificial Sequence
  chemically synthesized
acttcaaaaacaaagacctt

SEQ ID NO: 56298 - DNA, 20 bp, Artificial Sequence
  chemically synthesized
ttaaaataaaaacaaaacaa

SEQ ID NO: 56299 - DNA, 20 bp, Artificial Sequence
  chemically synthesized
ctcttttctttacctcatgc

SEQ ID NO: 56300 - DNA, 20 bp, Artificial Sequence
  chemically synthesized
gaatctcataagccagaatg

SEQ ID NO: 56301 - DNA, 20 bp, Artificial Sequence
  chemically synthesized
gccagaatgtggctacgact

SEQ ID NO: 56302 - DNA, 20 bp, Artificial Sequence
  chemically synthesized
gcctgatttgcctatgaaag

SEQ ID NO: 56303 - DNA, 20 bp, Artificial Sequence
  chemically synthesized
actagacatgacactttttg

SEQ ID NO: 56304 - DNA, 20 bp, Artificial Sequence
  chemically synthesized
tttgaggcccctgaatacag

SEQ ID NO: 56305 - DNA, 20 bp, Artificial Sequence
  chemically synthesized
ctgaatacagaggattaatt

SEQ ID NO: 56306 - DNA, 20 bp, Artificial Sequence
  chemically synthesized
gagctagaagagtatgcatc

SEQ ID NO: 56307 - DNA, 20 bp, Artificial Sequence
  chemically synthesized
agctagaagagtatgcatca

SEQ ID NO: 56308 - DNA, 20 bp, Artificial Sequence
  chemically synthesized
gtatgcatcagggaagatcc

SEQ ID NO: 56309 - DNA, 20 bp, Artificial Sequence
  chemically synthesized
agggaagatccaggttttca

SEQ ID NO: 56310 - DNA, 20 bp, Artificial Sequence
  chemically synthesized
gggaagatccaggttttcat

SEQ ID NO: 56311 - DNA, 20 bp, Artificial Sequence
  chemically synthesized
ggaagatccaggttttcatg

SEQ ID NO: 56312 - DNA, 20 bp, Artificial Sequence
  chemically synthesized
ggttttcatggggccaatat

SEQ ID NO: 56313 - DNA, 20 bp, Artificial Sequence
  chemically synthesized
gttttcatggggccaatatt

SEQ ID NO: 56314 - DNA, 20 bp, Artificial Sequence
  chemically synthesized
tgggagattctttcagtaga

SEQ ID NO: 56315 - DNA, 20 bp, Artificial Sequence
  chemically synthesized
gattttgaaagcaaaattgt

SEQ ID NO: 56316 - DNA, 20 bp, Artificial Sequence
  chemically synthesized
attttgaaagcaaaattgtt

SEQ ID NO: 56317 - DNA, 20 bp, Artificial Sequence
  chemically synthesized
caaaattgttgggccctccc

SEQ ID NO: 56318 - DNA, 20 bp, Artificial Sequence
  chemically synthesized
aaaattgttgggccctccca

SEQ ID NO: 56319 - DNA, 20 bp, Artificial Sequence
  chemically synthesized
aaattgttgggccctcccag

SEQ ID NO: 56320 - DNA, 20 bp, Artificial Sequence
  chemically synthesized
cccaggggaaatgcactact

SEQ ID NO: 56321 - DNA, 20 bp, Artificial Sequence
  chemically synthesized
atttgttttcatccttttcc

SEQ ID NO: 56322 - DNA, 20 bp, Artificial Sequence
  chemically synthesized
tgttttcatccttttcctgg

SEQ ID NO: 56323 - DNA, 20 bp, Artificial Sequence
  chemically synthesized
aaatgtcaccacaaagtcat

SEQ ID NO: 56324 - DNA, 20 bp, Artificial Sequence
  chemically synthesized
cttcccgatagacgacactc

SEQ ID NO: 56325 - DNA, 20 bp, Artificial Sequence
  chemically synthesized
tagacgacactcaggtcaaa

SEQ ID NO: 56326 - DNA, 20 bp, Artificial Sequence
  chemically synthesized
ctcaggtcaaaaggagcctc

SEQ ID NO: 56327 - DNA, 20 bp, Artificial Sequence
  chemically synthesized
aaaggagcctcaggtttaac

SEQ ID NO: 56328 - DNA, 20 bp, Artificial Sequence
  chemically synthesized
aagaaataaattctgtctaa

SEQ ID NO: 56329 - DNA, 20 bp, Artificial Sequence
  chemically synthesized
agaaataaattctgtctaaa

SEQ ID NO: 56330 - DNA, 20 bp, Artificial Sequence
  chemically synthesized
ttctgtctaaagggcagcca

SEQ ID NO: 56331 - DNA, 20 bp, Artificial Sequence
  chemically synthesized
accctttttgtgtcagtaaa

SEQ ID NO: 56332 - DNA, 20 bp, Artificial Sequence
  chemically synthesized
agaaaaccatttcttcttct

SEQ ID NO: 56333 - DNA, 20 bp, Artificial Sequence
  chemically synthesized
gaaaaccatttcttcttctt

SEQ ID NO: 56334 - DNA, 20 bp, Artificial Sequence
  chemically synthesized
ttctccagcctctcttgcag

SEQ ID NO: 56335 - DNA, 20 bp, Artificial Sequence
  chemically synthesized
tctccagcctctcttgcagt

SEQ ID NO: 56336 - DNA, 20 bp, Artificial Sequence
  chemically synthesized
ctccagcctctcttgcagtg

SEQ ID NO: 56337 - DNA, 20 bp, Artificial Sequence
  chemically synthesized
gcctctcttgcagtggggtg

SEQ ID NO: 56338 - DNA, 20 bp, Artificial Sequence
  chemically synthesized
ggggtgtggccttgtgagtg

SEQ ID NO: 56339 - DNA, 20 bp, Artificial Sequence
  chemically synthesized
gtgtggccttgtgagtgagg

SEQ ID NO: 56340 - DNA, 20 bp, Artificial Sequence
  chemically synthesized
tgtggccttgtgagtgaggt

SEQ ID NO: 56341 - DNA, 20 bp, Artificial Sequence
  chemically synthesized
atgcacatccacttccaccc

SEQ ID NO: 56342 - DNA, 20 bp, Artificial Sequence
  chemically synthesized
tgcacatccacttccaccct

SEQ ID NO: 56343 - DNA, 20 bp, Artificial Sequence
  chemically synthesized
ctccgtcctcttccaccact

SEQ ID NO: 56344 - DNA, 20 bp, Artificial Sequence
  chemically synthesized
ttggagtcctgcattacaga

SEQ ID NO: 56345 - DNA, 20 bp, Artificial Sequence
  chemically synthesized
gagtcctgcattacagacgg

SEQ ID NO: 56346 - DNA, 20 bp, Artificial Sequence
  chemically synthesized
cagacggtggagccacaaga

SEQ ID NO: 56347 - DNA, 20 bp, Artificial Sequence
  chemically synthesized
gaaagtgcccctaatactgc

SEQ ID NO: 56348 - DNA, 20 bp, Artificial Sequence
  chemically synthesized
aaagtgcccctaatactgct

SEQ ID NO: 56349 - DNA, 20 bp, Artificial Sequence
  chemically synthesized
ctgggagaagccccagctgc

SEQ ID NO: 56350 - DNA, 20 bp, Artificial Sequence
  chemically synthesized
gtgagtgagaaataaaccta

SEQ ID NO: 56351 - DNA, 20 bp, Artificial Sequence
  chemically synthesized
tgtttgagatatcatatgtt

SEQ ID NO: 56352 - DNA, 20 bp, Artificial Sequence
  chemically synthesized
gtttgagatatcatatgttt

SEQ ID NO: 56353 - DNA, 20 bp, Artificial Sequence
  chemically synthesized
tttgagatatcatatgtttg

SEQ ID NO: 56354 - DNA, 20 bp, Artificial Sequence
  chemically synthesized
ttgagatatcatatgtttgg

SEQ ID NO: 56355 - DNA, 20 bp, Artificial Sequence
  chemically synthesized
ccactttgccttttgaatat

SEQ ID NO: 56356 - DNA, 20 bp, Artificial Sequence
  chemically synthesized
ttactaatgagccccaaagc

SEQ ID NO: 56357 - DNA, 20 bp, Artificial Sequence
  chemically synthesized
tttattcttgtaataaaatt

SEQ ID NO: 56358 - DNA, 20 bp, Artificial Sequence
  chemically synthesized
tctcagctacagtgacatga

SEQ ID NO: 56359 - DNA, 20 bp, Artificial Sequence
  chemically synthesized
ctcagctacagtgacatgaa

SEQ ID NO: 56360 - DNA, 20 bp, Artificial Sequence
  chemically synthesized
gacatgaagggtctgcatcc

SEQ ID NO: 56361 - DNA, 20 bp, Artificial Sequence
  chemically synthesized
aagggtctgcatcctggccc

SEQ ID NO: 56362 - DNA, 20 bp, Artificial Sequence
  chemically synthesized
agaccttccagaatgtcctc

SEQ ID NO: 56363 - DNA, 20 bp, Artificial Sequence
  chemically synthesized
gaccttccagaatgtcctca

SEQ ID NO: 56364 - DNA, 20 bp, Artificial Sequence
  chemically synthesized
accttccagaatgtcctcag

SEQ ID NO: 56365 - DNA, 20 bp, Artificial Sequence
  chemically synthesized
ccttccagaatgtcctcagg

SEQ ID NO: 56366 - DNA, 20 bp, Artificial Sequence
  chemically synthesized
ccttaatgctgaattcctct

SEQ ID NO: 56367 - DNA, 20 bp, Artificial Sequence
  chemically synthesized
cttaatgctgaattcctctt

SEQ ID NO: 56368 - DNA, 20 bp, Artificial Sequence
  chemically synthesized
ctactgccttcctgccttgc

SEQ ID NO: 56369 - DNA, 20 bp, Artificial Sequence
  chemically synthesized
tactgccttcctgccttgca

SEQ ID NO: 56370 - DNA, 20 bp, Artificial Sequence
  chemically synthesized
ctccacacatgctaagctgt

SEQ ID NO: 56371 - DNA, 20 bp, Artificial Sequence
  chemically synthesized
cacacatgctaagctgttgg

SEQ ID NO: 56372 - DNA, 20 bp, Artificial Sequence
  chemically synthesized
acacatgctaagctgttgga

SEQ ID NO: 56373 - DNA, 20 bp, Artificial Sequence
  chemically synthesized
ctaagctgttggagggagat

SEQ ID NO: 56374 - DNA, 20 bp, Artificial Sequence
  chemically synthesized
agggagattggtattatttc

SEQ ID NO: 56375 - DNA, 20 bp, Artificial Sequence
  chemically synthesized
ggcagaacaaacccagagaa

SEQ ID NO: 56376 - DNA, 20 bp, Artificial Sequence
  chemically synthesized
aaggtattgatttcctagaa

SEQ ID NO: 56377 - DNA, 20 bp, Artificial Sequence
  chemically synthesized
gtcctgagacttccctgtcc

SEQ ID NO: 56378 - DNA, 20 bp, Artificial Sequence
  chemically synthesized
acttccctgtcctggcctct

SEQ ID NO: 56379 - DNA, 20 bp, Artificial Sequence
  chemically synthesized
ctggcctcttggctgcttgt

SEQ ID NO: 56380 - DNA, 20 bp, Artificial Sequence
  chemically synthesized
gctgcttgttggtcacagcc

SEQ ID NO: 56381 - DNA, 20 bp, Artificial Sequence
  chemically synthesized
ctgcttgttggtcacagcct

SEQ ID NO: 56382 - DNA, 20 bp, Artificial Sequence
  chemically synthesized
agcctgggaagttagttgtc

SEQ ID NO: 56383 - DNA, 20 bp, Artificial Sequence
  chemically synthesized
gcctgggaagttagttgtct

SEQ ID NO: 56384 - DNA, 20 bp, Artificial Sequence
  chemically synthesized
cctgggaagttagttgtctg

SEQ ID NO: 56385 - DNA, 20 bp, Artificial Sequence
  chemically synthesized
ctgggaagttagttgtctgg

SEQ ID NO: 56386 - DNA, 20 bp, Artificial Sequence
  chemically synthesized
ggaagttagttgtctggggg

SEQ ID NO: 56387 - DNA, 20 bp, Artificial Sequence
  chemically synthesized
gaagttagttgtctgggggt

SEQ ID NO: 56388 - DNA, 20 bp, Artificial Sequence
  chemically synthesized
aagttagttgtctgggggtg

SEQ ID NO: 56389 - DNA, 20 bp, Artificial Sequence
  chemically synthesized
agttagttgtctgggggtgg

SEQ ID NO: 56390 - DNA, 20 bp, Artificial Sequence
  chemically synthesized
cttcttgcatgactgatctc

SEQ ID NO: 56391 - DNA, 20 bp, Artificial Sequence
  chemically synthesized
cagttgttcacaagaagatg

SEQ ID NO: 56392 - DNA, 20 bp, Artificial Sequence
  chemically synthesized
agttgttcacaagaagatgc

SEQ ID NO: 56393 - DNA, 20 bp, Artificial Sequence
  chemically synthesized
tcactcagtagagtgtgagc

SEQ ID NO: 56394 - DNA, 20 bp, Artificial Sequence
  chemically synthesized
cactcagtagagtgtgagct

SEQ ID NO: 56395 - DNA, 20 bp, Artificial Sequence
  chemically synthesized
tgggatttaaagttacttgc

SEQ ID NO: 56396 - DNA, 20 bp, Artificial Sequence
  chemically synthesized
ccaataaaatgcagcccaca

SEQ ID NO: 56397 - DNA, 20 bp, Artificial Sequence
  chemically synthesized
gcagcccacatggcagagtt

SEQ ID NO: 56398 - DNA, 20 bp, Artificial Sequence
  chemically synthesized
ttgtagtcacttattcgtag

SEQ ID NO: 56399 - DNA, 20 bp, Artificial Sequence
  chemically synthesized
tttctgctgctttgccttag

SEQ ID NO: 56400 - DNA, 20 bp, Artificial Sequence
  chemically synthesized
atgactttgtttttcaccct

SEQ ID NO: 56401 - DNA, 20 bp, Artificial Sequence
  chemically synthesized
ctttgtttttcacccttgga

SEQ ID NO: 56402 - DNA, 20 bp, Artificial Sequence
  chemically synthesized
tttgtttttcacccttggat

SEQ ID NO: 56403 - DNA, 20 bp, Artificial Sequence
  chemically synthesized
acccttggatgggttgtaaa

SEQ ID NO: 56404 - DNA, 20 bp, Artificial Sequence
  chemically synthesized
cccttggatgggttgtaaaa

SEQ ID NO: 56405 - DNA, 20 bp, Artificial Sequence
  chemically synthesized
ccttggatgggttgtaaaag

SEQ ID NO: 56406 - DNA, 20 bp, Artificial Sequence
  chemically synthesized
aaaaggggaagtttatcaaa

SEQ ID NO: 56407 - DNA, 20 bp, Artificial Sequence
  chemically synthesized
aaaggggaagtttatcaaaa

SEQ ID NO: 56408 - DNA, 20 bp, Artificial Sequence
  chemically synthesized
tatcaaaagggaaaatgccc

SEQ ID NO: 56409 - DNA, 20 bp, Artificial Sequence
  chemically synthesized
ggaaaatgccctggacttag

SEQ ID NO: 56410 - DNA, 20 bp, Artificial Sequence
  chemically synthesized
gaaaatgccctggacttaga

SEQ ID NO: 56411 - DNA, 20 bp, Artificial Sequence
  chemically synthesized
ccctggacttagagggaagc

SEQ ID NO: 56412 - DNA, 20 bp, Artificial Sequence
  chemically synthesized
tggacttagagggaagcagg

SEQ ID NO: 56413 - DNA, 20 bp, Artificial Sequence
  chemically synthesized
ttagagggaagcaggaggaa

SEQ ID NO: 56414 - DNA, 20 bp, Artificial Sequence
  chemically synthesized
ggaagcaggaggaaaggcag

SEQ ID NO: 56415 - DNA, 20 bp, Artificial Sequence
  chemically synthesized
gaagcaggaggaaaggcagt

SEQ ID NO: 56416 - DNA, 20 bp, Artificial Sequence
  chemically synthesized
gcaggaggaaaggcagtggg

SEQ ID NO: 56417 - DNA, 20 bp, Artificial Sequence
  chemically synthesized
aacagccgaacagagaatgc

SEQ ID NO: 56418 - DNA, 20 bp, Artificial Sequence
  chemically synthesized
tctccattccattctcaaca

SEQ ID NO: 56419 - DNA, 20 bp, Artificial Sequence
  chemically synthesized
tgcccatcttttaataatag

SEQ ID NO: 56420 - DNA, 20 bp, Artificial Sequence
  chemically synthesized
tttaataatagaggaattga

SEQ ID NO: 56421 - DNA, 20 bp, Artificial Sequence
  chemically synthesized
ttatcaccagcatattgata

SEQ ID NO: 56422 - DNA, 20 bp, Artificial Sequence
  chemically synthesized
cagagaagttaattacattc

SEQ ID NO: 56423 - DNA, 20 bp, Artificial Sequence
  chemically synthesized
acattcaggcccctgtaaaa

SEQ ID NO: 56424 - DNA, 20 bp, Artificial Sequence
  chemically synthesized
gcccctgtaaaatggtttaa

SEQ ID NO: 56425 - DNA, 20 bp, Artificial Sequence
  chemically synthesized
cccctgtaaaatggtttaaa

SEQ ID NO: 56426 - DNA, 20 bp, Artificial Sequence
  chemically synthesized
aatccagttctttgattctg

SEQ ID NO: 56427 - DNA, 20 bp, Artificial Sequence
  chemically synthesized
taccttgttacatatcacaa

SEQ ID NO: 56428 - DNA, 20 bp, Artificial Sequence
  chemically synthesized
ttgttacatatcacaacggc

SEQ ID NO: 56429 - DNA, 20 bp, Artificial Sequence
  chemically synthesized
cggctggtcctcgtgccctc

SEQ ID NO: 56430 - DNA, 20 bp, Artificial Sequence
  chemically synthesized
tctttgagcaaattagaaaa

SEQ ID NO: 56431 - DNA, 20 bp, Artificial Sequence
  chemically synthesized
ctttgagcaaattagaaaaa

SEQ ID NO: 56432 - DNA, 20 bp, Artificial Sequence
  chemically synthesized
tttgagcaaattagaaaaag

SEQ ID NO: 56433 - DNA, 20 bp, Artificial Sequence
  chemically synthesized
ttcatcaagcaatacttcag

SEQ ID NO: 56434 - DNA, 20 bp, Artificial Sequence
  chemically synthesized
tcatcaagcaatacttcaga

SEQ ID NO: 56435 - DNA, 20 bp, Artificial Sequence
  chemically synthesized
atctactctgctaagagaag

SEQ ID NO: 56436 - DNA, 20 bp, Artificial Sequence
  chemically synthesized
tctactctgctaagagaagt

SEQ ID NO: 56437 - DNA, 20 bp, Artificial Sequence
  chemically synthesized
ctctgctaagagaagtggga

SEQ ID NO: 56438 - DNA, 20 bp, Artificial Sequence
  chemically synthesized
gctaagagaagtgggaaggc

SEQ ID NO: 56439 - DNA, 20 bp, Artificial Sequence
  chemically synthesized
gcttccctcttcagccttac

SEQ ID NO: 56440 - DNA, 20 bp, Artificial Sequence
  chemically synthesized
cttccctcttcagccttact

SEQ ID NO: 56441 - DNA, 20 bp, Artificial Sequence
  chemically synthesized
cctcttcagccttactgggt

SEQ ID NO: 56442 - DNA, 20 bp, Artificial Sequence
  chemically synthesized
ggttggaagatgcttaaaca

SEQ ID NO: 56443 - DNA, 20 bp, Artificial Sequence
  chemically synthesized
gttggaagatgcttaaacaa

SEQ ID NO: 56444 - DNA, 20 bp, Artificial Sequence
  chemically synthesized
ttggaagatgcttaaacaag

SEQ ID NO: 56445 - DNA, 20 bp, Artificial Sequence
  chemically synthesized
tgcttaaacaaggggaagtg

SEQ ID NO: 56446 - DNA, 20 bp, Artificial Sequence
  chemically synthesized
gcttaaacaaggggaagtga

SEQ ID NO: 56447 - DNA, 20 bp, Artificial Sequence
  chemically synthesized
acaaggggaagtgagggtgc

SEQ ID NO: 56448 - DNA, 20 bp, Artificial Sequence
  chemically synthesized
aggggaagtgagggtgcagg

SEQ ID NO: 56449 - DNA, 20 bp, Artificial Sequence
  chemically synthesized
ggaagtgagggtgcaggtgg

SEQ ID NO: 56450 - DNA, 20 bp, Artificial Sequence
  chemically synthesized
gagggtgcaggtggtggcag

SEQ ID NO: 56451 - DNA, 20 bp, Artificial Sequence
  chemically synthesized
aggtggtggcagtggagcac

SEQ ID NO: 56452 - DNA, 20 bp, Artificial Sequence
  chemically synthesized
tggcagtggagcactggctc

SEQ ID NO: 56453 - DNA, 20 bp, Artificial Sequence
  chemically synthesized
ggcagtggagcactggctct

SEQ ID NO: 56454 - DNA, 20 bp, Artificial Sequence
  chemically synthesized
gcagtggagcactggctctg

SEQ ID NO: 56455 - DNA, 20 bp, Artificial Sequence
  chemically synthesized
ccagtttaaactcacttaaa

SEQ ID NO: 56456 - DNA, 20 bp, Artificial Sequence
  chemically synthesized
cattaatgaagtgtcccatt

SEQ ID NO: 56457 - DNA, 20 bp, Artificial Sequence
  chemically synthesized
gtgtcccattaggacctaga

SEQ ID NO: 56458 - DNA, 20 bp, Artificial Sequence
  chemically synthesized
acctctcttcctgcttgtcc

SEQ ID NO: 56459 - DNA, 20 bp, Artificial Sequence
  chemically synthesized
cctctcttcctgcttgtcca

SEQ ID NO: 56460 - DNA, 20 bp, Artificial Sequence
  chemically synthesized
ctctcttcctgcttgtccag

SEQ ID NO: 56461 - DNA, 20 bp, Artificial Sequence
  chemically synthesized
actcacactaccccttccaa

SEQ ID NO: 56462 - DNA, 20 bp, Artificial Sequence
  chemically synthesized
ctcacactaccccttccaaa

SEQ ID NO: 56463 - DNA, 20 bp, Artificial Sequence
  chemically synthesized
tcacactaccccttccaaag

SEQ ID NO: 56464 - DNA, 20 bp, Artificial Sequence
  chemically synthesized
tacctctcccccttgccgtt

SEQ ID NO: 56465 - DNA, 20 bp, Artificial Sequence
  chemically synthesized
ctctcccccttgccgttcgg

SEQ ID NO: 56466 - DNA, 20 bp, Artificial Sequence
  chemically synthesized
tcccccttgccgttcggagg

SEQ ID NO: 56467 - DNA, 20 bp, Artificial Sequence
  chemically synthesized
atgtcagatttgcagtctgc

SEQ ID NO: 56468 - DNA, 20 bp, Artificial Sequence
  chemically synthesized
tgtcagatttgcagtctgct

SEQ ID NO: 56469 - DNA, 20 bp, Artificial Sequence
  chemically synthesized
gtcagatttgcagtctgctg

SEQ ID NO: 56470 - DNA, 20 bp, Artificial Sequence
  chemically synthesized
tcagatttgcagtctgctgg

SEQ ID NO: 56471 - DNA, 20 bp, Artificial Sequence
  chemically synthesized
atttgcagtctgctggggga

SEQ ID NO: 56472 - DNA, 20 bp, Artificial Sequence
  chemically synthesized
ctgcaagtgcattgagcatg

SEQ ID NO: 56473 - DNA, 20 bp, Artificial Sequence
  chemically synthesized
tgcaagtgcattgagcatgt

SEQ ID NO: 56474 - DNA, 20 bp, Artificial Sequence
  chemically synthesized
tgcattgagcatgtgggata

SEQ ID NO: 56475 - DNA, 20 bp, Artificial Sequence
  chemically synthesized
gcattgagcatgtgggatat

SEQ ID NO: 56476 - DNA, 20 bp, Artificial Sequence
  chemically synthesized
cattgagcatgtgggatatg

SEQ ID NO: 56477 - DNA, 20 bp, Artificial Sequence
  chemically synthesized
gcatgtgggatatggggatt

SEQ ID NO: 56478 - DNA, 20 bp, Artificial Sequence
  chemically synthesized
tgtgggatatggggatttgg

SEQ ID NO: 56479 - DNA, 20 bp, Artificial Sequence
  chemically synthesized
gggatatggggatttggagg

SEQ ID NO: 56480 - DNA, 20 bp, Artificial Sequence
  chemically synthesized
tggaggtggcagatgtcacc

SEQ ID NO: 56481 - DNA, 20 bp, Artificial Sequence
  chemically synthesized
aggtggcagatgtcacctgg

SEQ ID NO: 56482 - DNA, 20 bp, Artificial Sequence
  chemically synthesized
agatgtcacctggaggctct

SEQ ID NO: 56483 - DNA, 20 bp, Artificial Sequence
  chemically synthesized
tgagtgcttatgtgcatgta

SEQ ID NO: 56484 - DNA, 20 bp, Artificial Sequence
  chemically synthesized
gagtgcttatgtgcatgtaa

SEQ ID NO: 56485 - DNA, 20 bp, Artificial Sequence
  chemically synthesized
gcatgtaagggcttgcatgc

SEQ ID NO: 56486 - DNA, 20 bp, Artificial Sequence
  chemically synthesized
taagggcttgcatgctggtg

SEQ ID NO: 56487 - DNA, 20 bp, Artificial Sequence
  chemically synthesized
ggtgtggagttttgtaagaa

SEQ ID NO: 56488 - DNA, 20 bp, Artificial Sequence
  chemically synthesized
gtgtggagttttgtaagaat

SEQ ID NO: 56489 - DNA, 20 bp, Artificial Sequence
  chemically synthesized
gggctctcccctgatgctcc

SEQ ID NO: 56490 - DNA, 20 bp, Artificial Sequence
  chemically synthesized
atgtatatttgcaatgtaaa

SEQ ID NO: 56491 - DNA, 20 bp, Artificial Sequence
  chemically synthesized
aaatggtgaacctttagata

SEQ ID NO: 56492 - DNA, 20 bp, Artificial Sequence
  chemically synthesized
agatatggtgccctatccat

SEQ ID NO: 56493 - DNA, 20 bp, Artificial Sequence
  chemically synthesized
gatatggtgccctatccata

SEQ ID NO: 56494 - DNA, 20 bp, Artificial Sequence
  chemically synthesized
ccagttctcttcccctaacc

SEQ ID NO: 56495 - DNA, 20 bp, Artificial Sequence
  chemically synthesized
cccctaaccaggacccacac

SEQ ID NO: 56496 - DNA, 20 bp, Artificial Sequence
  chemically synthesized
accaggacccacactggtca

SEQ ID NO: 56497 - DNA, 20 bp, Artificial Sequence
  chemically synthesized
tggccaatgctgcttctgtg

SEQ ID NO: 56498 - DNA, 20 bp, Artificial Sequence
  chemically synthesized
acaagttaattgttcacaca

SEQ ID NO: 56499 - DNA, 20 bp, Artificial Sequence
  chemically synthesized
aactgagacaaagctgagct

SEQ ID NO: 56500 - DNA, 20 bp, Artificial Sequence
  chemically synthesized
tacctttaattttctttttg

SEQ ID NO: 56501 - DNA, 20 bp, Artificial Sequence
  chemically synthesized
acctttaattttctttttga

SEQ ID NO: 56502 - DNA, 20 bp, Artificial Sequence
  chemically synthesized
attttctttttgagggttga

SEQ ID NO: 56503 - DNA, 20 bp, Artificial Sequence
  chemically synthesized
ttttctttttgagggttgaa

SEQ ID NO: 56504 - DNA, 20 bp, Artificial Sequence
  chemically synthesized
tttctttttgagggttgaag

SEQ ID NO: 56505 - DNA, 20 bp, Artificial Sequence
  chemically synthesized
ttctttttgagggttgaagg

SEQ ID NO: 56506 - DNA, 20 bp, Artificial Sequence
  chemically synthesized
gggttgaagggggagcgaat

SEQ ID NO: 56507 - DNA, 20 bp, Artificial Sequence
  chemically synthesized
ggttgaagggggagcgaata

SEQ ID NO: 56508 - DNA, 20 bp, Artificial Sequence
  chemically synthesized
ctaaaagtatttttaagaca

SEQ ID NO: 56509 - DNA, 20 bp, Artificial Sequence
  chemically synthesized
gtagattgccttccgtgatg

SEQ ID NO: 56510 - DNA, 20 bp, Artificial Sequence
  chemically synthesized
gattgccttccgtgatgtgg

SEQ ID NO: 56511 - DNA, 20 bp, Artificial Sequence
  chemically synthesized
attgccttccgtgatgtggt

SEQ ID NO: 56512 - DNA, 20 bp, Artificial Sequence
  chemically synthesized
ggcatcacctcatcagtaga

SEQ ID NO: 56513 - DNA, 20 bp, Artificial Sequence
  chemically synthesized
ggcctctagagcaaagacag

SEQ ID NO: 56514 - DNA, 20 bp, Artificial Sequence
  chemically synthesized
tgcttgagtttcttgccctg

SEQ ID NO: 56515 - DNA, 20 bp, Artificial Sequence
  chemically synthesized
tttcttgccctgcggaattt

SEQ ID NO: 56516 - DNA, 20 bp, Artificial Sequence
  chemically synthesized
ttcctgaatttctagcctac

SEQ ID NO: 56517 - DNA, 20 bp, Artificial Sequence
  chemically synthesized
tagcctactggcttgcctta

SEQ ID NO: 56518 - DNA, 20 bp, Artificial Sequence
  chemically synthesized
aaaactctgactaatagaga

SEQ ID NO: 56519 - DNA, 20 bp, Artificial Sequence
  chemically synthesized
taaacttactcagaatgttg

SEQ ID NO: 56520 - DNA, 20 bp, Artificial Sequence
  chemically synthesized
aaacttactcagaatgttgt

SEQ ID NO: 56521 - DNA, 20 bp, Artificial Sequence
  chemically synthesized
aacttactcagaatgttgtg

SEQ ID NO: 56522 - DNA, 20 bp, Artificial Sequence
  chemically synthesized
ctcagaatgttgtggggatt

SEQ ID NO: 56523 - DNA, 20 bp, Artificial Sequence
  chemically synthesized
tcagaatgttgtggggattt

SEQ ID NO: 56524 - DNA, 20 bp, Artificial Sequence
  chemically synthesized
cagaatgttgtggggatttg

SEQ ID NO: 56525 - DNA, 20 bp, Artificial Sequence
  chemically synthesized
gatttggggagaagaccaca

SEQ ID NO: 56526 - DNA, 20 bp, Artificial Sequence
  chemically synthesized
ggagaagaccacaaggaatt

SEQ ID NO: 56527 - DNA, 20 bp, Artificial Sequence
  chemically synthesized
gagaagaccacaaggaattt

SEQ ID NO: 56528 - DNA, 20 bp, Artificial Sequence
  chemically synthesized
accacaaggaatttgggaga

SEQ ID NO: 56529 - DNA, 20 bp, Artificial Sequence
  chemically synthesized
aaggaatttgggagaaggac

SEQ ID NO: 56530 - DNA, 20 bp, Artificial Sequence
  chemically synthesized
atttgggagaaggacaggta

SEQ ID NO: 56531 - DNA, 20 bp, Artificial Sequence
  chemically synthesized
gggagaaggacaggtaagga

SEQ ID NO: 56532 - DNA, 20 bp, Artificial Sequence
  chemically synthesized
aaggacaggtaaggaaggaa

SEQ ID NO: 56533 - DNA, 20 bp, Artificial Sequence
  chemically synthesized
aaggaaggaaaggacagata

SEQ ID NO: 56534 - DNA, 20 bp, Artificial Sequence
  chemically synthesized
aaggaaaggacagataagga

SEQ ID NO: 56535 - DNA, 20 bp, Artificial Sequence
  chemically synthesized
aaggacagataaggaaggaa

SEQ ID NO: 56536 - DNA, 20 bp, Artificial Sequence
  chemically synthesized
gaaggaaaggacacctgtga

SEQ ID NO: 56537 - DNA, 20 bp, Artificial Sequence
  chemically synthesized
ggacacctgtgatggatgac

SEQ ID NO: 56538 - DNA, 20 bp, Artificial Sequence
  chemically synthesized
tccagttagccacttcatgt

SEQ ID NO: 56539 - DNA, 20 bp, Artificial Sequence
  chemically synthesized
caaacactatctttcacacc

SEQ ID NO: 56540 - DNA, 20 bp, Artificial Sequence
  chemically synthesized
aaacactatctttcacacct

SEQ ID NO: 56541 - DNA, 20 bp, Artificial Sequence
  chemically synthesized
cctcagaattctttcactgc

SEQ ID NO: 56542 - DNA, 20 bp, Artificial Sequence
  chemically synthesized
ttattataaaaatttacagt

SEQ ID NO: 56543 - DNA, 20 bp, Artificial Sequence
  chemically synthesized
tattataaaaatttacagta

SEQ ID NO: 56544 - DNA, 20 bp, Artificial Sequence
  chemically synthesized
tgtccagacacagtgttttc

SEQ ID NO: 56545 - DNA, 20 bp, Artificial Sequence
  chemically synthesized
atacaacttcttacctatag

SEQ ID NO: 56546 - DNA, 20 bp, Artificial Sequence
  chemically synthesized
acttcttacctatagtggtt

SEQ ID NO: 56547 - DNA, 20 bp, Artificial Sequence
  chemically synthesized
ggttaggtctatttttttgc

SEQ ID NO: 56548 - DNA, 20 bp, Artificial Sequence
  chemically synthesized
cttgtagtttcctgaaattc

SEQ ID NO: 56549 - DNA, 20 bp, Artificial Sequence
  chemically synthesized
tcaggcactttacctccacg

SEQ ID NO: 56550 - DNA, 20 bp, Artificial Sequence
  chemically synthesized
caggcactttacctccacga

SEQ ID NO: 56551 - DNA, 20 bp, Artificial Sequence
  chemically synthesized
ctccacgagggccccactgt

SEQ ID NO: 56552 - DNA, 20 bp, Artificial Sequence
  chemically synthesized
gccccactgtaggaataaaa

SEQ ID NO: 56553 - DNA, 20 bp, Artificial Sequence
  chemically synthesized
ccccactgtaggaataaaaa

SEQ ID NO: 56554 - DNA, 20 bp, Artificial Sequence
  chemically synthesized
cccactgtaggaataaaaag

SEQ ID NO: 56555 - DNA, 20 bp, Artificial Sequence
  chemically synthesized
aaggggatatgtcttgattc

SEQ ID NO: 56556 - DNA, 20 bp, Artificial Sequence
  chemically synthesized
ggatatgtcttgattcaggt

SEQ ID NO: 56557 - DNA, 20 bp, Artificial Sequence
  chemically synthesized
gtaggagttcctgtatgcag

SEQ ID NO: 56558 - DNA, 20 bp, Artificial Sequence
  chemically synthesized
ttgactttaactctgttcat

SEQ ID NO: 56559 - DNA, 20 bp, Artificial Sequence
  chemically synthesized
taactctgttcataggtatg

SEQ ID NO: 56560 - DNA, 20 bp, Artificial Sequence
  chemically synthesized
aactctgttcataggtatgt

SEQ ID NO: 56561 - DNA, 20 bp, Artificial Sequence
  chemically synthesized
tctgttcataggtatgtggg

SEQ ID NO: 56562 - DNA, 20 bp, Artificial Sequence
  chemically synthesized
ctgttcataggtatgtgggt

SEQ ID NO: 56563 - DNA, 20 bp, Artificial Sequence
  chemically synthesized
taggtatgtgggtgggtgag

SEQ ID NO: 56564 - DNA, 20 bp, Artificial Sequence
  chemically synthesized
gtatgtgggtgggtgagtgg

SEQ ID NO: 56565 - DNA, 20 bp, Artificial Sequence
  chemically synthesized
gggtgagtggaggcatgttc

SEQ ID NO: 56566 - DNA, 20 bp, Artificial Sequence
  chemically synthesized
gataatgaattaaaatctta

SEQ ID NO: 56567 - DNA, 20 bp, Artificial Sequence
  chemically synthesized
aagacatatttataaaatta

SEQ ID NO: 56568 - DNA, 20 bp, Artificial Sequence
  chemically synthesized
agacatatttataaaattat

SEQ ID NO: 56569 - DNA, 20 bp, Artificial Sequence
  chemically synthesized
tgctttttttgatgttccat

SEQ ID NO: 56570 - DNA, 20 bp, Artificial Sequence
  chemically synthesized
aaaatgataacatagtataa

SEQ ID NO: 56571 - DNA, 20 bp, Artificial Sequence
  chemically synthesized
aaatgataacatagtataaa

SEQ ID NO: 56572 - DNA, 20 bp, Artificial Sequence
  chemically synthesized
ataatatcacatatacttga

SEQ ID NO: 56573 - DNA, 20 bp, Artificial Sequence
  chemically synthesized
taatatcacatatacttgat

SEQ ID NO: 56574 - DNA, 20 bp, Artificial Sequence
  chemically synthesized
atacttgatgggtaacgtaa

SEQ ID NO: 56575 - DNA, 20 bp, Artificial Sequence
  chemically synthesized
gtaacgtaatggatttttat

SEQ ID NO: 56576 - DNA, 20 bp, Artificial Sequence
  chemically synthesized
tggatttttataggtaattt

SEQ ID NO: 56577 - DNA, 20 bp, Artificial Sequence
  chemically synthesized
tttttataggtaattttggc

SEQ ID NO: 56578 - DNA, 20 bp, Artificial Sequence
  chemically synthesized
ctggtgaaccctaacaagag

SEQ ID NO: 56579 - DNA, 20 bp, Artificial Sequence
  chemically synthesized
atatataaattactaatatc

SEQ ID NO: 56580 - DNA, 20 bp, Artificial Sequence
  chemically synthesized
actaatatctggaatgtaag

SEQ ID NO: 56581 - DNA, 20 bp, Artificial Sequence
  chemically synthesized
cagatgttaaaagtataata

SEQ ID NO: 56582 - DNA, 20 bp, Artificial Sequence
  chemically synthesized
aaatctgacccacatagaaa

SEQ ID NO: 56583 - DNA, 20 bp, Artificial Sequence
  chemically synthesized
aaagaaaactctatgcttga

SEQ ID NO: 56584 - DNA, 20 bp, Artificial Sequence
  chemically synthesized
tatgcttgatggttatattc

SEQ ID NO: 56585 - DNA, 20 bp, Artificial Sequence
  chemically synthesized
taaattctatcaaatgtata

SEQ ID NO: 56586 - DNA, 20 bp, Artificial Sequence
  chemically synthesized
acacaaattattttagaaac

SEQ ID NO: 56587 - DNA, 20 bp, Artificial Sequence
  chemically synthesized
attattttagaaactggaag

SEQ ID NO: 56588 - DNA, 20 bp, Artificial Sequence
  chemically synthesized
ttttgaagctagcttaatcc

SEQ ID NO: 56589 - DNA, 20 bp, Artificial Sequence
  chemically synthesized
ttaatcctggtacccaaacc

SEQ ID NO: 56590 - DNA, 20 bp, Artificial Sequence
  chemically synthesized
ttaatacataattataaagt

SEQ ID NO: 56591 - DNA, 20 bp, Artificial Sequence
  chemically synthesized
taatacataattataaagta

SEQ ID NO: 56592 - DNA, 20 bp, Artificial Sequence
  chemically synthesized
tataaagtagggcacatctc

SEQ ID NO: 56593 - DNA, 20 bp, Artificial Sequence
  chemically synthesized
acatctcaggaaaccaaagc

SEQ ID NO: 56594 - DNA, 20 bp, Artificial Sequence
  chemically synthesized
actagaagacataaataacc

SEQ ID NO: 56595 - DNA, 20 bp, Artificial Sequence
  chemically synthesized
tgaattgtttccctaagacc

SEQ ID NO: 56596 - DNA, 20 bp, Artificial Sequence
  chemically synthesized
ccctaagaccaggacacgac

SEQ ID NO: 56597 - DNA, 20 bp, Artificial Sequence
  chemically synthesized
ctttcaccatttctattcag

SEQ ID NO: 56598 - DNA, 20 bp, Artificial Sequence
  chemically synthesized
atttctattcagtggtgtac

SEQ ID NO: 56599 - DNA, 20 bp, Artificial Sequence
  chemically synthesized
tctattcagtggtgtacagg

SEQ ID NO: 56600 - DNA, 20 bp, Artificial Sequence
  chemically synthesized
tttgatttgcgtttctctga

SEQ ID NO: 56601 - DNA, 20 bp, Artificial Sequence
  chemically synthesized
gcattttttcatgtgtcttt

SEQ ID NO: 56602 - DNA, 20 bp, Artificial Sequence
  chemically synthesized
atcctttgcccactttttga

SEQ ID NO: 56603 - DNA, 20 bp, Artificial Sequence
  chemically synthesized
tcctttgcccactttttgat

SEQ ID NO: 56604 - DNA, 20 bp, Artificial Sequence
  chemically synthesized
cctttgcccactttttgatg

SEQ ID NO: 56605 - DNA, 20 bp, Artificial Sequence
  chemically synthesized
tttgagttcattgtagattc

SEQ ID NO: 56606 - DNA, 20 bp, Artificial Sequence
  chemically synthesized
ttctggatattagccatcaa

SEQ ID NO: 56607 - DNA, 20 bp, Artificial Sequence
  chemically synthesized
ccatctcacaccagttagaa

SEQ ID NO: 56608 - DNA, 20 bp, Artificial Sequence
  chemically synthesized
atggtgatcattaaaaagtc

SEQ ID NO: 56609 - DNA, 20 bp, Artificial Sequence
  chemically synthesized
ttaaaaagtcaggaaacaaa

SEQ ID NO: 56610 - DNA, 20 bp, Artificial Sequence
  chemically synthesized
agtcaggaaacaaaaggtgc

SEQ ID NO: 56611 - DNA, 20 bp, Artificial Sequence
  chemically synthesized
caggaaacaaaaggtgctgg

SEQ ID NO: 56612 - DNA, 20 bp, Artificial Sequence
  chemically synthesized
aggaaacaaaaggtgctgga

SEQ ID NO: 56613 - DNA, 20 bp, Artificial Sequence
  chemically synthesized
aaaaggtgctggagggaatg

SEQ ID NO: 56614 - DNA, 20 bp, Artificial Sequence
  chemically synthesized
tggagggaatgtggagaaat

SEQ ID NO: 56615 - DNA, 20 bp, Artificial Sequence
  chemically synthesized
taggaacacttttacactgt

SEQ ID NO: 56616 - DNA, 20 bp, Artificial Sequence
  chemically synthesized
gaacacttttacactgttgg

SEQ ID NO: 56617 - DNA, 20 bp, Artificial Sequence
  chemically synthesized
aacacttttacactgttggt

SEQ ID NO: 56618 - DNA, 20 bp, Artificial Sequence
  chemically synthesized
gtaaactagttcaaccattg

SEQ ID NO: 56619 - DNA, 20 bp, Artificial Sequence
  chemically synthesized
aaccattgtggaagacagtg

SEQ ID NO: 56620 - DNA, 20 bp, Artificial Sequence
  chemically synthesized
gacagtgtggcgagtcctca

SEQ ID NO: 56621 - DNA, 20 bp, Artificial Sequence
  chemically synthesized
tgacccagccatcccattac

SEQ ID NO: 56622 - DNA, 20 bp, Artificial Sequence
  chemically synthesized
gacccagccatcccattact

SEQ ID NO: 56623 - DNA, 20 bp, Artificial Sequence
  chemically synthesized
attactgggtatatacccaa

SEQ ID NO: 56624 - DNA, 20 bp, Artificial Sequence
  chemically synthesized
tattcacaatagcaaagact

SEQ ID NO: 56625 - DNA, 20 bp, Artificial Sequence
  chemically synthesized
aatgtccatcaatgatagac

SEQ ID NO: 56626 - DNA, 20 bp, Artificial Sequence
  chemically synthesized
tagactggattaagaaaatg

SEQ ID NO: 56627 - DNA, 20 bp, Artificial Sequence
  chemically synthesized
aatgtggcacatatacacca

SEQ ID NO: 56628 - DNA, 20 bp, Artificial Sequence
  chemically synthesized
atactatgcagccataaaaa

SEQ ID NO: 56629 - DNA, 20 bp, Artificial Sequence
  chemically synthesized
gatgagttcatgtcctttat

SEQ ID NO: 56630 - DNA, 20 bp, Artificial Sequence
  chemically synthesized
atgagttcatgtcctttata

SEQ ID NO: 56631 - DNA, 20 bp, Artificial Sequence
  chemically synthesized
tcatgtcctttatagggaca

SEQ ID NO: 56632 - DNA, 20 bp, Artificial Sequence
  chemically synthesized
tatagggacatggatgaagc

SEQ ID NO: 56633 - DNA, 20 bp, Artificial Sequence
  chemically synthesized
attctcagcaaactatcaca

SEQ ID NO: 56634 - DNA, 20 bp, Artificial Sequence
  chemically synthesized
tgcatgttctcactcataga

SEQ ID NO: 56635 - DNA, 20 bp, Artificial Sequence
  chemically synthesized
gcatgttctcactcatagat

SEQ ID NO: 56636 - DNA, 20 bp, Artificial Sequence
  chemically synthesized
aattgaacgataagagcact

SEQ ID NO: 56637 - DNA, 20 bp, Artificial Sequence
  chemically synthesized
cgataagagcacttggacac

SEQ ID NO: 56638 - DNA, 20 bp, Artificial Sequence
  chemically synthesized
aagagcacttggacacagga

SEQ ID NO: 56639 - DNA, 20 bp, Artificial Sequence
  chemically synthesized
agagcacttggacacaggaa

SEQ ID NO: 56640 - DNA, 20 bp, Artificial Sequence
  chemically synthesized
gagcacttggacacaggaag

SEQ ID NO: 56641 - DNA, 20 bp, Artificial Sequence
  chemically synthesized
gaaggggaacatcacacacc

SEQ ID NO: 56642 - DNA, 20 bp, Artificial Sequence
  chemically synthesized
aaggggaacatcacacacca

SEQ ID NO: 56643 - DNA, 20 bp, Artificial Sequence
  chemically synthesized
cacacaccagggccagtcat

SEQ ID NO: 56644 - DNA, 20 bp, Artificial Sequence
  chemically synthesized
acaccagggccagtcatagg

SEQ ID NO: 56645 - DNA, 20 bp, Artificial Sequence
  chemically synthesized
cagggccagtcataggtgga

SEQ ID NO: 56646 - DNA, 20 bp, Artificial Sequence
  chemically synthesized
ggccagtcataggtggaagg

SEQ ID NO: 56647 - DNA, 20 bp, Artificial Sequence
  chemically synthesized
gccagtcataggtggaagga

SEQ ID NO: 56648 - DNA, 20 bp, Artificial Sequence
  chemically synthesized
ccagtcataggtggaaggag

SEQ ID NO: 56649 - DNA, 20 bp, Artificial Sequence
  chemically synthesized
cagtcataggtggaaggagg

SEQ ID NO: 56650 - DNA, 20 bp, Artificial Sequence
  chemically synthesized
agtcataggtggaaggaggg

SEQ ID NO: 56651 - DNA, 20 bp, Artificial Sequence
  chemically synthesized
cataggtggaaggagggggg

SEQ ID NO: 56652 - DNA, 20 bp, Artificial Sequence
  chemically synthesized
ataggtggaaggagggggga

SEQ ID NO: 56653 - DNA, 20 bp, Artificial Sequence
  chemically synthesized
gaggggggagggatagcatt

SEQ ID NO: 56654 - DNA, 20 bp, Artificial Sequence
  chemically synthesized
aatgtaaatgacgagttaat

SEQ ID NO: 56655 - DNA, 20 bp, Artificial Sequence
  chemically synthesized
atcggtgcagcacaccaaca

SEQ ID NO: 56656 - DNA, 20 bp, Artificial Sequence
  chemically synthesized
attaaaaaaactaaatataa

SEQ ID NO: 56657 - DNA, 20 bp, Artificial Sequence
  chemically synthesized
agaaaatatcttcccaactt

SEQ ID NO: 56658 - DNA, 20 bp, Artificial Sequence
  chemically synthesized
gaaaatatcttcccaacttt

SEQ ID NO: 56659 - DNA, 20 bp, Artificial Sequence
  chemically synthesized
atcttcccaactttgggagt

SEQ ID NO: 56660 - DNA, 20 bp, Artificial Sequence
  chemically synthesized
taggcaaagttatcttagca

SEQ ID NO: 56661 - DNA, 20 bp, Artificial Sequence
  chemically synthesized
gcaccagtaagaaaataaaa

SEQ ID NO: 56662 - DNA, 20 bp, Artificial Sequence
  chemically synthesized
gcaatacatctatctgacaa

SEQ ID NO: 56663 - DNA, 20 bp, Artificial Sequence
  chemically synthesized
tcatatccagcaataacaaa

SEQ ID NO: 56664 - DNA, 20 bp, Artificial Sequence
  chemically synthesized
gatactagcccaaagaagac

SEQ ID NO: 56665 - DNA, 20 bp, Artificial Sequence
  chemically synthesized
gtatatctctcatgcatcgc

SEQ ID NO: 56666 - DNA, 20 bp, Artificial Sequence
  chemically synthesized
atctctcatgcatcgctgga

SEQ ID NO: 56667 - DNA, 20 bp, Artificial Sequence
  chemically synthesized
tcgctggaaggagagtagaa

SEQ ID NO: 56668 - DNA, 20 bp, Artificial Sequence
  chemically synthesized
taaccactttgaaaaactgt

SEQ ID NO: 56669 - DNA, 20 bp, Artificial Sequence
  chemically synthesized
aaccactttgaaaaactgtt

SEQ ID NO: 56670 - DNA, 20 bp, Artificial Sequence
  chemically synthesized
cactttgaaaaactgttggg

SEQ ID NO: 56671 - DNA, 20 bp, Artificial Sequence
  chemically synthesized
gacacagcaattccattctg

SEQ ID NO: 56672 - DNA, 20 bp, Artificial Sequence
  chemically synthesized
gagaaagaattaaaaatttg

SEQ ID NO: 56673 - DNA, 20 bp, Artificial Sequence
  chemically synthesized
tttgtggtatattcatacag

SEQ ID NO: 56674 - DNA, 20 bp, Artificial Sequence
  chemically synthesized
tgaaaagatgagctatgaga

SEQ ID NO: 56675 - DNA, 20 bp, Artificial Sequence
  chemically synthesized
ctatgagatggacatcaaca

SEQ ID NO: 56676 - DNA, 20 bp, Artificial Sequence
  chemically synthesized
tggctaactctcacaaacac

SEQ ID NO: 56677 - DNA, 20 bp, Artificial Sequence
  chemically synthesized
taataagaactatcagaaac

SEQ ID NO: 56678 - DNA, 20 bp, Artificial Sequence
  chemically synthesized
cagaaactggcaaaaaccaa

SEQ ID NO: 56679 - DNA, 20 bp, Artificial Sequence
  chemically synthesized
agaaactggcaaaaaccaaa

SEQ ID NO: 56680 - DNA, 20 bp, Artificial Sequence
  chemically synthesized
ttgagaattatgattgctcc

SEQ ID NO: 56681 - DNA, 20 bp, Artificial Sequence
  chemically synthesized
tgagaattatgattgctcct

SEQ ID NO: 56682 - DNA, 20 bp, Artificial Sequence
  chemically synthesized
gagaattatgattgctcctg

SEQ ID NO: 56683 - DNA, 20 bp, Artificial Sequence
  chemically synthesized
cctggggtatgaagattgac

SEQ ID NO: 56684 - DNA, 20 bp, Artificial Sequence
  chemically synthesized
ggtatgaagattgactggaa

SEQ ID NO: 56685 - DNA, 20 bp, Artificial Sequence
  chemically synthesized
ggaacatgaagcatccttct

SEQ ID NO: 56686 - DNA, 20 bp, Artificial Sequence
  chemically synthesized
gaacatgaagcatccttcta

SEQ ID NO: 56687 - DNA, 20 bp, Artificial Sequence
  chemically synthesized
aacatgaagcatccttctag

SEQ ID NO: 56688 - DNA, 20 bp, Artificial Sequence
  chemically synthesized
aagttctatatctttaccat

SEQ ID NO: 56689 - DNA, 20 bp, Artificial Sequence
  chemically synthesized
ctatatctttaccattggaa

SEQ ID NO: 56690 - DNA, 20 bp, Artificial Sequence
  chemically synthesized
tttaccattggaatggctac

SEQ ID NO: 56691 - DNA, 20 bp, Artificial Sequence
  chemically synthesized
aaaaattaaagaagtaacaa

SEQ ID NO: 56692 - DNA, 20 bp, Artificial Sequence
  chemically synthesized
ggtatatattctcattgtaa

SEQ ID NO: 56693 - DNA, 20 bp, Artificial Sequence
  chemically synthesized
tagaataaaagtaatatcat

SEQ ID NO: 56694 - DNA, 20 bp, Artificial Sequence
  chemically synthesized
agaataaaagtaatatcata

SEQ ID NO: 56695 - DNA, 20 bp, Artificial Sequence
  chemically synthesized
tcagccaaatagctctaaag

SEQ ID NO: 56696 - DNA, 20 bp, Artificial Sequence
  chemically synthesized
tagctctaaagaggtataac

SEQ ID NO: 56697 - DNA, 20 bp, Artificial Sequence
  chemically synthesized
agctctaaagaggtataact

SEQ ID NO: 56698 - DNA, 20 bp, Artificial Sequence
  chemically synthesized
gaggtataactgggtcaaat

SEQ ID NO: 56699 - DNA, 20 bp, Artificial Sequence
  chemically synthesized
tcaaattggaagtgaagatc

SEQ ID NO: 56700 - DNA, 20 bp, Artificial Sequence
  chemically synthesized
caaattggaagtgaagatct

SEQ ID NO: 56701 - DNA, 20 bp, Artificial Sequence
  chemically synthesized
gggcagaagaaaagttcctc

SEQ ID NO: 56702 - DNA, 20 bp, Artificial Sequence
  chemically synthesized
ggcagaagaaaagttcctct

SEQ ID NO: 56703 - DNA, 20 bp, Artificial Sequence
  chemically synthesized
gtaattttgtttaaatccta

SEQ ID NO: 56704 - DNA, 20 bp, Artificial Sequence
  chemically synthesized
aatcctaaggagtgtgttct

SEQ ID NO: 56705 - DNA, 20 bp, Artificial Sequence
  chemically synthesized
ctaaggagtgtgttctagga

SEQ ID NO: 56706 - DNA, 20 bp, Artificial Sequence
  chemically synthesized
ctacaacccacaatgtgtgt

SEQ ID NO: 56707 - DNA, 20 bp, Artificial Sequence
  chemically synthesized
caatgtgtgttggcttccct

SEQ ID NO: 56708 - DNA, 20 bp, Artificial Sequence
  chemically synthesized
gttggcttcccttggtgaac

SEQ ID NO: 56709 - DNA, 20 bp, Artificial Sequence
  chemically synthesized
caaatgagtcctttcgagaa

SEQ ID NO: 56710 - DNA, 20 bp, Artificial Sequence
  chemically synthesized
gtcctttcgagaatggttcc

SEQ ID NO: 56711 - DNA, 20 bp, Artificial Sequence
  chemically synthesized
cctggactctgcacaaaaag

SEQ ID NO: 56712 - DNA, 20 bp, Artificial Sequence
  chemically synthesized
aaaagaggaacctgtttgtc

SEQ ID NO: 56713 - DNA, 20 bp, Artificial Sequence
  chemically synthesized
ttgtctggcttcgagtgagc

SEQ ID NO: 56714 - DNA, 20 bp, Artificial Sequence
  chemically synthesized
tggcttcgagtgagctggcc

SEQ ID NO: 56715 - DNA, 20 bp, Artificial Sequence
  chemically synthesized
cttcgagtgagctggccagg

SEQ ID NO: 56716 - DNA, 20 bp, Artificial Sequence
  chemically synthesized
ctggccaggaggttaaatgc

SEQ ID NO: 56717 - DNA, 20 bp, Artificial Sequence
  chemically synthesized
tggccaggaggttaaatgca

SEQ ID NO: 56718 - DNA, 20 bp, Artificial Sequence
  chemically synthesized
ggccaggaggttaaatgcag

SEQ ID NO: 56719 - DNA, 20 bp, Artificial Sequence
  chemically synthesized
gttacagaatctttcacctt

SEQ ID NO: 56720 - DNA, 20 bp, Artificial Sequence
  chemically synthesized
ctttcacctttggtttattg

SEQ ID NO: 56721 - DNA, 20 bp, Artificial Sequence
  chemically synthesized
tattgtggtctgagagtgac

SEQ ID NO: 56722 - DNA, 20 bp, Artificial Sequence
  chemically synthesized
cagtcatgaaaactagagat

SEQ ID NO: 56723 - DNA, 20 bp, Artificial Sequence
  chemically synthesized
gaaatgttaagttaattaac

SEQ ID NO: 56724 - DNA, 20 bp, Artificial Sequence
  chemically synthesized
gctaaatgtattgattattt

SEQ ID NO: 56725 - DNA, 20 bp, Artificial Sequence
  chemically synthesized
ctaaatgtattgattatttt

SEQ ID NO: 56726 - DNA, 20 bp, Artificial Sequence
  chemically synthesized
taaatgtattgattattttg

SEQ ID NO: 56727 - DNA, 20 bp, Artificial Sequence
  chemically synthesized
tttagagtgtgcgattgttt

SEQ ID NO: 56728 - DNA, 20 bp, Artificial Sequence
  chemically synthesized
ttgtttaggctttaaagagt

SEQ ID NO: 56729 - DNA, 20 bp, Artificial Sequence
  chemically synthesized
gtgtgtgtctcaaagttact

SEQ ID NO: 56730 - DNA, 20 bp, Artificial Sequence
  chemically synthesized
tgtgtgtctcaaagttacta

SEQ ID NO: 56731 - DNA, 20 bp, Artificial Sequence
  chemically synthesized
tagggagttgtgttccttgt

SEQ ID NO: 56732 - DNA, 20 bp, Artificial Sequence
  chemically synthesized
agggagttgtgttccttgtt

SEQ ID NO: 56733 - DNA, 20 bp, Artificial Sequence
  chemically synthesized
gggagttgtgttccttgttg

SEQ ID NO: 56734 - DNA, 20 bp, Artificial Sequence
  chemically synthesized
tgttccttgttggggtagat

SEQ ID NO: 56735 - DNA, 20 bp, Artificial Sequence
  chemically synthesized
gtagataggctttcccaact

SEQ ID NO: 56736 - DNA, 20 bp, Artificial Sequence
  chemically synthesized
aggctttcccaacttggaac

SEQ ID NO: 56737 - DNA, 20 bp, Artificial Sequence
  chemically synthesized
aaaaataaaaaccgaatttt

SEQ ID NO: 56738 - DNA, 20 bp, Artificial Sequence
  chemically synthesized
aaaataaaaaccgaattttt

SEQ ID NO: 56739 - DNA, 20 bp, Artificial Sequence
  chemically synthesized
gggtaagctagacagatacc

SEQ ID NO: 56740 - DNA, 20 bp, Artificial Sequence
  chemically synthesized
ggtaagctagacagatacca

SEQ ID NO: 56741 - DNA, 20 bp, Artificial Sequence
  chemically synthesized
agataccagggaataagctt

SEQ ID NO: 56742 - DNA, 20 bp, Artificial Sequence
  chemically synthesized
ataagcttaggacaaacatc

SEQ ID NO: 56743 - DNA, 20 bp, Artificial Sequence
  chemically synthesized
agcttaggacaaacatcagg

SEQ ID NO: 56744 - DNA, 20 bp, Artificial Sequence
  chemically synthesized
caggtggaaagatctgaaga

SEQ ID NO: 56745 - DNA, 20 bp, Artificial Sequence
  chemically synthesized
atttgataaataaatataga

SEQ ID NO: 56746 - DNA, 20 bp, Artificial Sequence
  chemically synthesized
tttgataaataaatatagaa

SEQ ID NO: 56747 - DNA, 20 bp, Artificial Sequence
  chemically synthesized
ttgataaataaatatagaag

SEQ ID NO: 56748 - DNA, 20 bp, Artificial Sequence
  chemically synthesized
ataaatatagaaggggagac

SEQ ID NO: 56749 - DNA, 20 bp, Artificial Sequence
  chemically synthesized
taaatatagaaggggagact

SEQ ID NO: 56750 - DNA, 20 bp, Artificial Sequence
  chemically synthesized
atagaaggggagactgggag

SEQ ID NO: 56751 - DNA, 20 bp, Artificial Sequence
  chemically synthesized
tagaaggggagactgggagc

SEQ ID NO: 56752 - DNA, 20 bp, Artificial Sequence
  chemically synthesized
agaaggggagactgggagcg

SEQ ID NO: 56753 - DNA, 20 bp, Artificial Sequence
  chemically synthesized
gggtcccatttctgaatttt

SEQ ID NO: 56754 - DNA, 20 bp, Artificial Sequence
  chemically synthesized
ttctgaattttaggtaaaca

SEQ ID NO: 56755 - DNA, 20 bp, Artificial Sequence
  chemically synthesized
tctgaattttaggtaaacat

SEQ ID NO: 56756 - DNA, 20 bp, Artificial Sequence
  chemically synthesized
ttttaggtaaacatgggatg

SEQ ID NO: 56757 - DNA, 20 bp, Artificial Sequence
  chemically synthesized
acatgggatgtggagaaact

SEQ ID NO: 56758 - DNA, 20 bp, Artificial Sequence
  chemically synthesized
gagtatagaatatatttgta

SEQ ID NO: 56759 - DNA, 20 bp, Artificial Sequence
  chemically synthesized
tgtgtgaaatatccaattac

SEQ ID NO: 56760 - DNA, 20 bp, Artificial Sequence
  chemically synthesized
cccaacctgtagcaagtttc

SEQ ID NO: 56761 - DNA, 20 bp, Artificial Sequence
  chemically synthesized
tagcaagtttctggtactgt

SEQ ID NO: 56762 - DNA, 20 bp, Artificial Sequence
  chemically synthesized
agcaagtttctggtactgtt

SEQ ID NO: 56763 - DNA, 20 bp, Artificial Sequence
  chemically synthesized
ctggtactgttgggaattta

SEQ ID NO: 56764 - DNA, 20 bp, Artificial Sequence
  chemically synthesized
gtactgttgggaatttaagg

SEQ ID NO: 56765 - DNA, 20 bp, Artificial Sequence
  chemically synthesized
aatttaaggaggatctaaaa

SEQ ID NO: 56766 - DNA, 20 bp, Artificial Sequence
  chemically synthesized
agaatgaaattaatgagcaa

SEQ ID NO: 56767 - DNA, 20 bp, Artificial Sequence
  chemically synthesized
taatgagcaatggacaatca

SEQ ID NO: 56768 - DNA, 20 bp, Artificial Sequence
  chemically synthesized
gacaatcaaggatgaccgta

SEQ ID NO: 56769 - DNA, 20 bp, Artificial Sequence
  chemically synthesized
gtatggctgtcttgtgaaac

SEQ ID NO: 56770 - DNA, 20 bp, Artificial Sequence
  chemically synthesized
tatggctgtcttgtgaaact

SEQ ID NO: 56771 - DNA, 20 bp, Artificial Sequence
  chemically synthesized
tgaaactgggcatcctttta

SEQ ID NO: 56772 - DNA, 20 bp, Artificial Sequence
  chemically synthesized
gaaactgggcatccttttaa

SEQ ID NO: 56773 - DNA, 20 bp, Artificial Sequence
  chemically synthesized
ttttaagggctctgaactcc

SEQ ID NO: 56774 - DNA, 20 bp, Artificial Sequence
  chemically synthesized
ctgaaaacgtttctttctta

SEQ ID NO: 56775 - DNA, 20 bp, Artificial Sequence
  chemically synthesized
ctgaaatatctgaatccaat

SEQ ID NO: 56776 - DNA, 20 bp, Artificial Sequence
  chemically synthesized
caattggaaaacccaaatag

SEQ ID NO: 56777 - DNA, 20 bp, Artificial Sequence
  chemically synthesized
ttggaaaacccaaatagagg

SEQ ID NO: 56778 - DNA, 20 bp, Artificial Sequence
  chemically synthesized
aacccaaatagaggaggctc

SEQ ID NO: 56779 - DNA, 20 bp, Artificial Sequence
  chemically synthesized
tggacagattacaatatgac

SEQ ID NO: 56780 - DNA, 20 bp, Artificial Sequence
  chemically synthesized
aaagtcaagagatatgttaa

SEQ ID NO: 56781 - DNA, 20 bp, Artificial Sequence
  chemically synthesized
aagtcaagagatatgttaaa

SEQ ID NO: 56782 - DNA, 20 bp, Artificial Sequence
  chemically synthesized
aaagggtaagtatgtttgag

SEQ ID NO: 56783 - DNA, 20 bp, Artificial Sequence
  chemically synthesized
aagggtaagtatgtttgagt

SEQ ID NO: 56784 - DNA, 20 bp, Artificial Sequence
  chemically synthesized
taagtatgtttgagtgggca

SEQ ID NO: 56785 - DNA, 20 bp, Artificial Sequence
  chemically synthesized
tgtttgagtgggcaaggaag

SEQ ID NO: 56786 - DNA, 20 bp, Artificial Sequence
  chemically synthesized
ggcaaggaagtggtcaaata

SEQ ID NO: 56787 - DNA, 20 bp, Artificial Sequence
  chemically synthesized
gtgaatgaaagtgaacagaa

SEQ ID NO: 56788 - DNA, 20 bp, Artificial Sequence
  chemically synthesized
cagaaaggtcaacctcagct

SEQ ID NO: 56789 - DNA, 20 bp, Artificial Sequence
  chemically synthesized
cagcttggccaagagaaacc

SEQ ID NO: 56790 - DNA, 20 bp, Artificial Sequence
  chemically synthesized
cactcagcccaccagccagc

SEQ ID NO: 56791 - DNA, 20 bp, Artificial Sequence
  chemically synthesized
gccaaagtcaaacctccgtg

SEQ ID NO: 56792 - DNA, 20 bp, Artificial Sequence
  chemically synthesized
ccaaagtcaaacctccgtgt

SEQ ID NO: 56793 - DNA, 20 bp, Artificial Sequence
  chemically synthesized
cttgtttgaatgagttgtta

SEQ ID NO: 56794 - DNA, 20 bp, Artificial Sequence
  chemically synthesized
tccatttccagcctagattg

SEQ ID NO: 56795 - DNA, 20 bp, Artificial Sequence
  chemically synthesized
ctagattgtggacatcgaac

SEQ ID NO: 56796 - DNA, 20 bp, Artificial Sequence
  chemically synthesized
tgtggacatcgaactggttc

SEQ ID NO: 56797 - DNA, 20 bp, Artificial Sequence
  chemically synthesized
cttttgacatattttattcc

SEQ ID NO: 56798 - DNA, 20 bp, Artificial Sequence
  chemically synthesized
ttattcctggaaaatgtgtt

SEQ ID NO: 56799 - DNA, 20 bp, Artificial Sequence
  chemically synthesized
tattcctggaaaatgtgtta

SEQ ID NO: 56800 - DNA, 20 bp, Artificial Sequence
  chemically synthesized
tgtgttagggaagtgaacag

SEQ ID NO: 56801 - DNA, 20 bp, Artificial Sequence
  chemically synthesized
tccaacagcatgtttatcta

SEQ ID NO: 56802 - DNA, 20 bp, Artificial Sequence
  chemically synthesized
agcactccataaatagatgc

SEQ ID NO: 56803 - DNA, 20 bp, Artificial Sequence
  chemically synthesized
tcccataaattgacaaaaac

SEQ ID NO: 56804 - DNA, 20 bp, Artificial Sequence
  chemically synthesized
attgacaaaaactggaattc

SEQ ID NO: 56805 - DNA, 20 bp, Artificial Sequence
  chemically synthesized
ttgacaaaaactggaattca

SEQ ID NO: 56806 - DNA, 20 bp, Artificial Sequence
  chemically synthesized
actggaattcagggcttgtt

SEQ ID NO: 56807 - DNA, 20 bp, Artificial Sequence
  chemically synthesized
cttgtttggactatagactg

SEQ ID NO: 56808 - DNA, 20 bp, Artificial Sequence
  chemically synthesized
gagaattgtctcagtgtcta

SEQ ID NO: 56809 - DNA, 20 bp, Artificial Sequence
  chemically synthesized
tctcagtgtctatggaatgt

SEQ ID NO: 56810 - DNA, 20 bp, Artificial Sequence
  chemically synthesized
aggaagccttctattactac

SEQ ID NO: 56811 - DNA, 20 bp, Artificial Sequence
  chemically synthesized
aagccttctattactactgg

SEQ ID NO: 56812 - DNA, 20 bp, Artificial Sequence
  chemically synthesized
cttgatttactttgctcact

SEQ ID NO: 56813 - DNA, 20 bp, Artificial Sequence
  chemically synthesized
taggacactaactaaaaagt

SEQ ID NO: 56814 - DNA, 20 bp, Artificial Sequence
  chemically synthesized
taactaaaaagtaggtcatt

SEQ ID NO: 56815 - DNA, 20 bp, Artificial Sequence
  chemically synthesized
aggtcattcggatatgaatt

SEQ ID NO: 56816 - DNA, 20 bp, Artificial Sequence
  chemically synthesized
atgaatttggagatagcctc

SEQ ID NO: 56817 - DNA, 20 bp, Artificial Sequence
  chemically synthesized
tcaccagagatagtaaccct

SEQ ID NO: 56818 - DNA, 20 bp, Artificial Sequence
  chemically synthesized
tggcaacaagagatgactta

SEQ ID NO: 56819 - DNA, 20 bp, Artificial Sequence
  chemically synthesized
aagagatgacttatggatga

SEQ ID NO: 56820 - DNA, 20 bp, Artificial Sequence
  chemically synthesized
tgacttatggatgaaggaga

SEQ ID NO: 56821 - DNA, 20 bp, Artificial Sequence
  chemically synthesized
aaaatgccaacttattcctg

SEQ ID NO: 56822 - DNA, 20 bp, Artificial Sequence
  chemically synthesized
aacttattcctgtggatttt

SEQ ID NO: 56823 - DNA, 20 bp, Artificial Sequence
  chemically synthesized
tttggaaaatttacattgag

SEQ ID NO: 56824 - DNA, 20 bp, Artificial Sequence
  chemically synthesized
gaagtcaaattgtgtcaaga

SEQ ID NO: 56825 - DNA, 20 bp, Artificial Sequence
  chemically synthesized
gtgtcaagatggtagaagtt

SEQ ID NO: 56826 - DNA, 20 bp, Artificial Sequence
  chemically synthesized
ccccattactcgttattcac

SEQ ID NO: 56827 - DNA, 20 bp, Artificial Sequence
  chemically synthesized
ttattcactggccgactatt

SEQ ID NO: 56828 - DNA, 20 bp, Artificial Sequence
  chemically synthesized
accatcacagccttcctgtg

SEQ ID NO: 56829 - DNA, 20 bp, Artificial Sequence
  chemically synthesized
tcacagccttcctgtgaggc

SEQ ID NO: 56830 - DNA, 20 bp, Artificial Sequence
  chemically synthesized
ggcaggttatctcattttac

SEQ ID NO: 56831 - DNA, 20 bp, Artificial Sequence
  chemically synthesized
gttatctcattttacaggtg

SEQ ID NO: 56832 - DNA, 20 bp, Artificial Sequence
  chemically synthesized
ttttacaggtgaggaaactg

SEQ ID NO: 56833 - DNA, 20 bp, Artificial Sequence
  chemically synthesized
tacattacataactttctct

SEQ ID NO: 56834 - DNA, 20 bp, Artificial Sequence
  chemically synthesized
gtcaaaaaactagtaagcac

SEQ ID NO: 56835 - DNA, 20 bp, Artificial Sequence
  chemically synthesized
aaactagtaagcactggtat

SEQ ID NO: 56836 - DNA, 20 bp, Artificial Sequence
  chemically synthesized
aactagtaagcactggtatt

SEQ ID NO: 56837 - DNA, 20 bp, Artificial Sequence
  chemically synthesized
gtaagcactggtattgggat

SEQ ID NO: 56838 - DNA, 20 bp, Artificial Sequence
  chemically synthesized
tggtattgggattggaaaca

SEQ ID NO: 56839 - DNA, 20 bp, Artificial Sequence
  chemically synthesized
cagatgcaacttgaagacac

SEQ ID NO: 56840 - DNA, 20 bp, Artificial Sequence
  chemically synthesized
gacactggattgtctcgtgt

SEQ ID NO: 56841 - DNA, 20 bp, Artificial Sequence
  chemically synthesized
acactggattgtctcgtgtt

SEQ ID NO: 56842 - DNA, 20 bp, Artificial Sequence
  chemically synthesized
gtgttgggcaaacagatttt

SEQ ID NO: 56843 - DNA, 20 bp, Artificial Sequence
  chemically synthesized
tttttggtgagaagtgttgt

SEQ ID NO: 56844 - DNA, 20 bp, Artificial Sequence
  chemically synthesized
agaagtgttgtaggagacgc

SEQ ID NO: 56845 - DNA, 20 bp, Artificial Sequence
  chemically synthesized
tttaaattctgatatgaagt

SEQ ID NO: 56846 - DNA, 20 bp, Artificial Sequence
  chemically synthesized
ttaaattctgatatgaagtt

SEQ ID NO: 56847 - DNA, 20 bp, Artificial Sequence
  chemically synthesized
aattctgatatgaagttggg

SEQ ID NO: 56848 - DNA, 20 bp, Artificial Sequence
  chemically synthesized
attctgatatgaagttggga

SEQ ID NO: 56849 - DNA, 20 bp, Artificial Sequence
  chemically synthesized
atatgaagttgggagggatg

SEQ ID NO: 56850 - DNA, 20 bp, Artificial Sequence
  chemically synthesized
tatgaagttgggagggatgt

SEQ ID NO: 56851 - DNA, 20 bp, Artificial Sequence
  chemically synthesized
gcatcatttgactgagtctc

SEQ ID NO: 56852 - DNA, 20 bp, Artificial Sequence
  chemically synthesized
catcatttgactgagtctca

SEQ ID NO: 56853 - DNA, 20 bp, Artificial Sequence
  chemically synthesized
tctgaaagctgaaccgtgag

SEQ ID NO: 56854 - DNA, 20 bp, Artificial Sequence
  chemically synthesized
gagatttgtatgagtgtttt

SEQ ID NO: 56855 - DNA, 20 bp, Artificial Sequence
  chemically synthesized
tgtatgagtgtttttggtga

SEQ ID NO: 56856 - DNA, 20 bp, Artificial Sequence
  chemically synthesized
agtgtttttggtgaaggaca

SEQ ID NO: 56857 - DNA, 20 bp, Artificial Sequence
  chemically synthesized
ggtgaaggacaaggagtttc

SEQ ID NO: 56858 - DNA, 20 bp, Artificial Sequence
  chemically synthesized
gaaggacaaggagtttcagg

SEQ ID NO: 56859 - DNA, 20 bp, Artificial Sequence
  chemically synthesized
aaggagtttcaggaggcctt

SEQ ID NO: 56860 - DNA, 20 bp, Artificial Sequence
  chemically synthesized
aggagtttcaggaggccttt

SEQ ID NO: 56861 - DNA, 20 bp, Artificial Sequence
  chemically synthesized
gatgttaacatttgttaatt

SEQ ID NO: 56862 - DNA, 20 bp, Artificial Sequence
  chemically synthesized
gccacatattctttcttttg

SEQ ID NO: 56863 - DNA, 20 bp, Artificial Sequence
  chemically synthesized
gcatatgaaaagagagacag

SEQ ID NO: 56864 - DNA, 20 bp, Artificial Sequence
  chemically synthesized
ccatatttcaaattccagat

SEQ ID NO: 56865 - DNA, 20 bp, Artificial Sequence
  chemically synthesized
agattggtgatgttgacatc

SEQ ID NO: 56866 - DNA, 20 bp, Artificial Sequence
  chemically synthesized
gattggtgatgttgacatct

SEQ ID NO: 56867 - DNA, 20 bp, Artificial Sequence
  chemically synthesized
atctgggtcctcaaaagcac

SEQ ID NO: 56868 - DNA, 20 bp, Artificial Sequence
  chemically synthesized
gcgatccattcacttccaac

SEQ ID NO: 56869 - DNA, 20 bp, Artificial Sequence
  chemically synthesized
tctgcatcttccaagtctcc

SEQ ID NO: 56870 - DNA, 20 bp, Artificial Sequence
  chemically synthesized
ctgcatcttccaagtctcct

SEQ ID NO: 56871 - DNA, 20 bp, Artificial Sequence
  chemically synthesized
tgcatcttccaagtctcctg

SEQ ID NO: 56872 - DNA, 20 bp, Artificial Sequence
  chemically synthesized
atcttccaagtctcctgggg

SEQ ID NO: 56873 - DNA, 20 bp, Artificial Sequence
  chemically synthesized
aaatgcatccttttgaaata

SEQ ID NO: 56874 - DNA, 20 bp, Artificial Sequence
  chemically synthesized
taataaaatagcagactctg

SEQ ID NO: 56875 - DNA, 20 bp, Artificial Sequence
  chemically synthesized
tggcagacatgaaatagtaa

SEQ ID NO: 56876 - DNA, 20 bp, Artificial Sequence
  chemically synthesized
aatggattatgtagtattca

SEQ ID NO: 56877 - DNA, 20 bp, Artificial Sequence
  chemically synthesized
attcaaggaagaaaagccca

SEQ ID NO: 56878 - DNA, 20 bp, Artificial Sequence
  chemically synthesized
ttcaaggaagaaaagcccaa

SEQ ID NO: 56879 - DNA, 20 bp, Artificial Sequence
  chemically synthesized
tttctgagttaaagaaccag

SEQ ID NO: 56880 - DNA, 20 bp, Artificial Sequence
  chemically synthesized
attcttttctgtatttaaac

SEQ ID NO: 56881 - DNA, 20 bp, Artificial Sequence
  chemically synthesized
attttttttgtcttaaatga

SEQ ID NO: 56882 - DNA, 20 bp, Artificial Sequence
  chemically synthesized
cagaattttgcttttttaag

SEQ ID NO: 56883 - DNA, 20 bp, Artificial Sequence
  chemically synthesized
tcactttcccttgcctaaaa

SEQ ID NO: 56884 - DNA, 20 bp, Artificial Sequence
  chemically synthesized
aaaggcatcccaattaaaag

SEQ ID NO: 56885 - DNA, 20 bp, Artificial Sequence
  chemically synthesized
tgactgagacaaacgtgatt

SEQ ID NO: 56886 - DNA, 20 bp, Artificial Sequence
  chemically synthesized
gactgagacaaacgtgatta

SEQ ID NO: 56887 - DNA, 20 bp, Artificial Sequence
  chemically synthesized
tagggaaaaaaaattagatc

SEQ ID NO: 56888 - DNA, 20 bp, Artificial Sequence
  chemically synthesized
gaaaaaaaattagatctggc

SEQ ID NO: 56889 - DNA, 20 bp, Artificial Sequence
  chemically synthesized
gatctggcaggactccgatt

SEQ ID NO: 56890 - DNA, 20 bp, Artificial Sequence
  chemically synthesized
agtatctgatagattctagc

SEQ ID NO: 56891 - DNA, 20 bp, Artificial Sequence
  chemically synthesized
gatagattctagcaggatgc

SEQ ID NO: 56892 - DNA, 20 bp, Artificial Sequence
  chemically synthesized
agcaggatgctggaagaaag

SEQ ID NO: 56893 - DNA, 20 bp, Artificial Sequence
  chemically synthesized
gcaggatgctggaagaaagt

SEQ ID NO: 56894 - DNA, 20 bp, Artificial Sequence
  chemically synthesized
caggatgctggaagaaagtg

SEQ ID NO: 56895 - DNA, 20 bp, Artificial Sequence
  chemically synthesized
tttttttttgctattacttt

SEQ ID NO: 56896 - DNA, 20 bp, Artificial Sequence
  chemically synthesized
gatctgtcacacatagtatt

SEQ ID NO: 56897 - DNA, 20 bp, Artificial Sequence
  chemically synthesized
gttttacatgatagaaagtg

SEQ ID NO: 56898 - DNA, 20 bp, Artificial Sequence
  chemically synthesized
tacatgatagaaagtgaggc

SEQ ID NO: 56899 - DNA, 20 bp, Artificial Sequence
  chemically synthesized
gtcagaaaatatacacccac

SEQ ID NO: 56900 - DNA, 20 bp, Artificial Sequence
  chemically synthesized
tcagaaaatatacacccact

SEQ ID NO: 56901 - DNA, 20 bp, Artificial Sequence
  chemically synthesized
cactgggacctgagaaaatc

SEQ ID NO: 56902 - DNA, 20 bp, Artificial Sequence
  chemically synthesized
gagtgctcaagtgtgagcct

SEQ ID NO: 56903 - DNA, 20 bp, Artificial Sequence
  chemically synthesized
ggactgcttccatgtatttt

SEQ ID NO: 56904 - DNA, 20 bp, Artificial Sequence
  chemically synthesized
ctagaaattagatgcttcca

SEQ ID NO: 56905 - DNA, 20 bp, Artificial Sequence
  chemically synthesized
atgcttccaaggctttacac

SEQ ID NO: 56906 - DNA, 20 bp, Artificial Sequence
  chemically synthesized
gttgattgtcccagagacca

SEQ ID NO: 56907 - DNA, 20 bp, Artificial Sequence
  chemically synthesized
ttgattgtcccagagaccaa

SEQ ID NO: 56908 - DNA, 20 bp, Artificial Sequence
  chemically synthesized
ctttacttaaataactcagt

SEQ ID NO: 56909 - DNA, 20 bp, Artificial Sequence
  chemically synthesized
tttacttaaataactcagta

SEQ ID NO: 56910 - DNA, 20 bp, Artificial Sequence
  chemically synthesized
aaataactcagtagggaaaa

SEQ ID NO: 56911 - DNA, 20 bp, Artificial Sequence
  chemically synthesized
aataactcagtagggaaaat

SEQ ID NO: 56912 - DNA, 20 bp, Artificial Sequence
  chemically synthesized
ttaataaagctgactgtgaa

SEQ ID NO: 56913 - DNA, 20 bp, Artificial Sequence
  chemically synthesized
ggaccaaccagttgaatgac

SEQ ID NO: 56914 - DNA, 20 bp, Artificial Sequence
  chemically synthesized
caaccagttgaatgacaggt

SEQ ID NO: 56915 - DNA, 20 bp, Artificial Sequence
  chemically synthesized
aaacagccctagctagacca

SEQ ID NO: 56916 - DNA, 20 bp, Artificial Sequence
  chemically synthesized
aacagccctagctagaccat

SEQ ID NO: 56917 - DNA, 20 bp, Artificial Sequence
  chemically synthesized
ccctagctagaccatgggtg

SEQ ID NO: 56918 - DNA, 20 bp, Artificial Sequence
  chemically synthesized
cctagctagaccatgggtgt

SEQ ID NO: 56919 - DNA, 20 bp, Artificial Sequence
  chemically synthesized
tgggcactgctcacaaccac

SEQ ID NO: 56920 - DNA, 20 bp, Artificial Sequence
  chemically synthesized
accacaggcatttgtttttc

SEQ ID NO: 56921 - DNA, 20 bp, Artificial Sequence
  chemically synthesized
gctctttatgtagtttcagc

SEQ ID NO: 56922 - DNA, 20 bp, Artificial Sequence
  chemically synthesized
ctctttatgtagtttcagca

SEQ ID NO: 56923 - DNA, 20 bp, Artificial Sequence
  chemically synthesized
tatgtagtttcagcagggta

SEQ ID NO: 56924 - DNA, 20 bp, Artificial Sequence
  chemically synthesized
tagatttcttccctgtgcag

SEQ ID NO: 56925 - DNA, 20 bp, Artificial Sequence
  chemically synthesized
tggtagctttctaaatgcag

SEQ ID NO: 56926 - DNA, 20 bp, Artificial Sequence
  chemically synthesized
gcagtggttctgaccttaca

SEQ ID NO: 56927 - DNA, 20 bp, Artificial Sequence
  chemically synthesized
acagaacatgtattattatt

SEQ ID NO: 56928 - DNA, 20 bp, Artificial Sequence
  chemically synthesized
atttggattcagacatcctg

SEQ ID NO: 56929 - DNA, 20 bp, Artificial Sequence
  chemically synthesized
tttggattcagacatcctgt

SEQ ID NO: 56930 - DNA, 20 bp, Artificial Sequence
  chemically synthesized
gattcagacatcctgtgggt

SEQ ID NO: 56931 - DNA, 20 bp, Artificial Sequence
  chemically synthesized
tgtcagcacccacataacaa

SEQ ID NO: 56932 - DNA, 20 bp, Artificial Sequence
  chemically synthesized
actcccactgccactcagtc

SEQ ID NO: 56933 - DNA, 20 bp, Artificial Sequence
  chemically synthesized
actgtttcctgcacctaaaa

SEQ ID NO: 56934 - DNA, 20 bp, Artificial Sequence
  chemically synthesized
acctaaaatggctgtgtttt

SEQ ID NO: 56935 - DNA, 20 bp, Artificial Sequence
  chemically synthesized
tgttttaggaagcagctcac

SEQ ID NO: 56936 - DNA, 20 bp, Artificial Sequence
  chemically synthesized
tggcttttcagtagatatta

SEQ ID NO: 56937 - DNA, 20 bp, Artificial Sequence
  chemically synthesized
ggcttttcagtagatattat

SEQ ID NO: 56938 - DNA, 20 bp, Artificial Sequence
  chemically synthesized
gcttttcagtagatattatg

SEQ ID NO: 56939 - DNA, 20 bp, Artificial Sequence
  chemically synthesized
caatgacttataaaatgtga

SEQ ID NO: 56940 - DNA, 20 bp, Artificial Sequence
  chemically synthesized
gacgtgagctgaaaaattct

SEQ ID NO: 56941 - DNA, 20 bp, Artificial Sequence
  chemically synthesized
agagtagttaatgtacacag

SEQ ID NO: 56942 - DNA, 20 bp, Artificial Sequence
  chemically synthesized
tacacagtggttaagacctg

SEQ ID NO: 56943 - DNA, 20 bp, Artificial Sequence
  chemically synthesized
aagacctgtggtgttagagc

SEQ ID NO: 56944 - DNA, 20 bp, Artificial Sequence
  chemically synthesized
acagatgtgcgtttaaattc

SEQ ID NO: 56945 - DNA, 20 bp, Artificial Sequence
  chemically synthesized
aattctggatactctacctg

SEQ ID NO: 56946 - DNA, 20 bp, Artificial Sequence
  chemically synthesized
tctacctgtggtcctctgtc

SEQ ID NO: 56947 - DNA, 20 bp, Artificial Sequence
  chemically synthesized
cctgtggtcctctgtcaggt

SEQ ID NO: 56948 - DNA, 20 bp, Artificial Sequence
  chemically synthesized
tgctatgagcaatcactgaa

SEQ ID NO: 56949 - DNA, 20 bp, Artificial Sequence
  chemically synthesized
ctgaatggatatttacaaag

SEQ ID NO: 56950 - DNA, 20 bp, Artificial Sequence
  chemically synthesized
aggtagcttagaacacagta

SEQ ID NO: 56951 - DNA, 20 bp, Artificial Sequence
  chemically synthesized
gaacacagtaaggatttaat

SEQ ID NO: 56952 - DNA, 20 bp, Artificial Sequence
  chemically synthesized
aacacagtaaggatttaata

SEQ ID NO: 56953 - DNA, 20 bp, Artificial Sequence
  chemically synthesized
ctgagaaataagtaatgaaa

SEQ ID NO: 56954 - DNA, 20 bp, Artificial Sequence
  chemically synthesized
aaaaagtttatgtcaattga

SEQ ID NO: 56955 - DNA, 20 bp, Artificial Sequence
  chemically synthesized
tgacggtgttataattacta

SEQ ID NO: 56956 - DNA, 20 bp, Artificial Sequence
  chemically synthesized
aatattattcatatttaaat

SEQ ID NO: 56957 - DNA, 20 bp, Artificial Sequence
  chemically synthesized
ccataaaaatttaaattgtg

SEQ ID NO: 56958 - DNA, 20 bp, Artificial Sequence
  chemically synthesized
ttgtgtggaatatgtatcat

SEQ ID NO: 56959 - DNA, 20 bp, Artificial Sequence
  chemically synthesized
gaagtcttcttcctactgaa

SEQ ID NO: 56960 - DNA, 20 bp, Artificial Sequence
  chemically synthesized
gattaatagtgtaaatgatt

SEQ ID NO: 56961 - DNA, 20 bp, Artificial Sequence
  chemically synthesized
tgaattcctataccccaaac

SEQ ID NO: 56962 - DNA, 20 bp, Artificial Sequence
  chemically synthesized
gaattcctataccccaaact

SEQ ID NO: 56963 - DNA, 20 bp, Artificial Sequence
  chemically synthesized
tttgacgtaatcatgtgaat

SEQ ID NO: 56964 - DNA, 20 bp, Artificial Sequence
  chemically synthesized
ttgacgtaatcatgtgaata

SEQ ID NO: 56965 - DNA, 20 bp, Artificial Sequence
  chemically synthesized
aaatctgaaacttaaaaagt

SEQ ID NO: 56966 - DNA, 20 bp, Artificial Sequence
  chemically synthesized
ttaaaaatagtatgatcacc

SEQ ID NO: 56967 - DNA, 20 bp, Artificial Sequence
  chemically synthesized
taaaaatagtatgatcacca

SEQ ID NO: 56968 - DNA, 20 bp, Artificial Sequence
  chemically synthesized
ctgcctcccatcagtctttg

SEQ ID NO: 56969 - DNA, 20 bp, Artificial Sequence
  chemically synthesized
tcagtctttgtggaaatcca

SEQ ID NO: 56970 - DNA, 20 bp, Artificial Sequence
  chemically synthesized
tcccttaatgagaaaattct

SEQ ID NO: 56971 - DNA, 20 bp, Artificial Sequence
  chemically synthesized
cccttaatgagaaaattcta

SEQ ID NO: 56972 - DNA, 20 bp, Artificial Sequence
  chemically synthesized
aatgcataagctgagtcatt

SEQ ID NO: 56973 - DNA, 20 bp, Artificial Sequence
  chemically synthesized
tttttaactcttaaagagaa

SEQ ID NO: 56974 - DNA, 20 bp, Artificial Sequence
  chemically synthesized
ttttaactcttaaagagaaa

SEQ ID NO: 56975 - DNA, 20 bp, Artificial Sequence
  chemically synthesized
agagaaagggcttaatttgc

SEQ ID NO: 56976 - DNA, 20 bp, Artificial Sequence
  chemically synthesized
aatttgcaggagcaagttga

SEQ ID NO: 56977 - DNA, 20 bp, Artificial Sequence
  chemically synthesized
aattacaatgtgtttatgta

SEQ ID NO: 56978 - DNA, 20 bp, Artificial Sequence
  chemically synthesized
attacaatgtgtttatgtat

SEQ ID NO: 56979 - DNA, 20 bp, Artificial Sequence
  chemically synthesized
caatgtgtttatgtatgggc

SEQ ID NO: 56980 - DNA, 20 bp, Artificial Sequence
  chemically synthesized
aatgtgtttatgtatgggca

SEQ ID NO: 56981 - DNA, 20 bp, Artificial Sequence
  chemically synthesized
tgtttatgtatgggcagggt

SEQ ID NO: 56982 - DNA, 20 bp, Artificial Sequence
  chemically synthesized
tatgggcagggttggcttct

SEQ ID NO: 56983 - DNA, 20 bp, Artificial Sequence
  chemically synthesized
ccaaaaagaattattacata

SEQ ID NO: 56984 - DNA, 20 bp, Artificial Sequence
  chemically synthesized
attacatatggccaatttgt

SEQ ID NO: 56985 - DNA, 20 bp, Artificial Sequence
  chemically synthesized
atatggccaatttgttggtg

SEQ ID NO: 56986 - DNA, 20 bp, Artificial Sequence
  chemically synthesized
tggccaatttgttggtgtgg

SEQ ID NO: 56987 - DNA, 20 bp, Artificial Sequence
  chemically synthesized
aaaacactttcaaaagttat

SEQ ID NO: 56988 - DNA, 20 bp, Artificial Sequence
  chemically synthesized
tatattctagccactgattt

SEQ ID NO: 56989 - DNA, 20 bp, Artificial Sequence
  chemically synthesized
agccactgatttaggtgctg

SEQ ID NO: 56990 - DNA, 20 bp, Artificial Sequence
  chemically synthesized
aggtgctgaggatatagcac

SEQ ID NO: 56991 - DNA, 20 bp, Artificial Sequence
  chemically synthesized
atcctgaaagttatgctttc

SEQ ID NO: 56992 - DNA, 20 bp, Artificial Sequence
  chemically synthesized
tccagtttgatctcctgaca

SEQ ID NO: 56993 - DNA, 20 bp, Artificial Sequence
  chemically synthesized
ctgacaaggtaaaattactt

SEQ ID NO: 56994 - DNA, 20 bp, Artificial Sequence
  chemically synthesized
caacatttaagatctacact

SEQ ID NO: 56995 - DNA, 20 bp, Artificial Sequence
  chemically synthesized
aacatttaagatctacactt

SEQ ID NO: 56996 - DNA, 20 bp, Artificial Sequence
  chemically synthesized
attccttcttgagaatactg

SEQ ID NO: 56997 - DNA, 20 bp, Artificial Sequence
  chemically synthesized
tgatcccctgccccctgtca

SEQ ID NO: 56998 - DNA, 20 bp, Artificial Sequence
  chemically synthesized
tcccctgccccctgtcatgg

SEQ ID NO: 56999 - DNA, 20 bp, Artificial Sequence
  chemically synthesized
aaaaaaaatgactgaatatg

SEQ ID NO: 57000 - DNA, 20 bp, Artificial Sequence
  chemically synthesized
aaaaaaatgactgaatatgt

SEQ ID NO: 57001 - DNA, 20 bp, Artificial Sequence
  chemically synthesized
tcaaacccagtgcctgactc

SEQ ID NO: 57002 - DNA, 20 bp, Artificial Sequence
  chemically synthesized
gtgcctgactcaggtctgtt

SEQ ID NO: 57003 - DNA, 20 bp, Artificial Sequence
  chemically synthesized
tgcctgactcaggtctgtta

SEQ ID NO: 57004 - DNA, 20 bp, Artificial Sequence
  chemically synthesized
atgaaatgaatgagagtaag

SEQ ID NO: 57005 - DNA, 20 bp, Artificial Sequence
  chemically synthesized
aatgaatgagagtaagagga

SEQ ID NO: 57006 - DNA, 20 bp, Artificial Sequence
  chemically synthesized
atgaatgagagtaagaggaa

SEQ ID NO: 57007 - DNA, 20 bp, Artificial Sequence
  chemically synthesized
aatgagagtaagaggaaggg

SEQ ID NO: 57008 - DNA, 20 bp, Artificial Sequence
  chemically synthesized
atgagagtaagaggaaggga

SEQ ID NO: 57009 - DNA, 20 bp, Artificial Sequence
  chemically synthesized
agagtaagaggaagggaggg

SEQ ID NO: 57010 - DNA, 20 bp, Artificial Sequence
  chemically synthesized
gagtaagaggaagggaggga

SEQ ID NO: 57011 - DNA, 20 bp, Artificial Sequence
  chemically synthesized
taagaggaagggagggaggg

SEQ ID NO: 57012 - DNA, 20 bp, Artificial Sequence
  chemically synthesized
agacagagaagcttagatct

SEQ ID NO: 57013 - DNA, 20 bp, Artificial Sequence
  chemically synthesized
gacagagaagcttagatcta

SEQ ID NO: 57014 - DNA, 20 bp, Artificial Sequence
  chemically synthesized
ctctctctctctatctctct

SEQ ID NO: 57015 - DNA, 20 bp, Artificial Sequence
  chemically synthesized
aagtggctatgctcaaaatg

SEQ ID NO: 57016 - DNA, 20 bp, Artificial Sequence
  chemically synthesized
agtcatttctaagttttctt

SEQ ID NO: 57017 - DNA, 20 bp, Artificial Sequence
  chemically synthesized
tctaagttttcttatggatt

SEQ ID NO: 57018 - DNA, 20 bp, Artificial Sequence
  chemically synthesized
tattcagttccctaacagac

SEQ ID NO: 57019 - DNA, 20 bp, Artificial Sequence
  chemically synthesized
taacagacctgagtcaggca

SEQ ID NO: 57020 - DNA, 20 bp, Artificial Sequence
  chemically synthesized
acctgagtcaggcactgggt

SEQ ID NO: 57021 - DNA, 20 bp, Artificial Sequence
  chemically synthesized
actgggtttgaatgcagttt

SEQ ID NO: 57022 - DNA, 20 bp, Artificial Sequence
  chemically synthesized
aaccaccatgacagggggca

SEQ ID NO: 57023 - DNA, 20 bp, Artificial Sequence
  chemically synthesized
gggggcaggggatcaatact

SEQ ID NO: 57024 - DNA, 20 bp, Artificial Sequence
  chemically synthesized
agacctcagtattctcaaga

SEQ ID NO: 57025 - DNA, 20 bp, Artificial Sequence
  chemically synthesized
ccaagtgtagatcttaaatg

SEQ ID NO: 57026 - DNA, 20 bp, Artificial Sequence
  chemically synthesized
gattactctgctcttacaaa

SEQ ID NO: 57027 - DNA, 20 bp, Artificial Sequence
  chemically synthesized
taccttgtcaggagatcaaa

SEQ ID NO: 57028 - DNA, 20 bp, Artificial Sequence
  chemically synthesized
aatcctgaaagcataacttt

SEQ ID NO: 57029 - DNA, 20 bp, Artificial Sequence
  chemically synthesized
tcagcacctaaatcagtggc

SEQ ID NO: 57030 - DNA, 20 bp, Artificial Sequence
  chemically synthesized
ctgactagagaaagatctaa

SEQ ID NO: 57031 - DNA, 20 bp, Artificial Sequence
  chemically synthesized
agtttactcattgaaataca

SEQ ID NO: 57032 - DNA, 20 bp, Artificial Sequence
  chemically synthesized
ccatatgtaataattctttt

SEQ ID NO: 57033 - DNA, 20 bp, Artificial Sequence
  chemically synthesized
aacagcagcaggaggcatgt

SEQ ID NO: 57034 - DNA, 20 bp, Artificial Sequence
  chemically synthesized
aaattaagccctttctcttt

SEQ ID NO: 57035 - DNA, 20 bp, Artificial Sequence
  chemically synthesized
aatgactcagcttatgcatt

SEQ ID NO: 57036 - DNA, 20 bp, Artificial Sequence
  chemically synthesized
ttttgagtcatgtaattacg

SEQ ID NO: 57037 - DNA, 20 bp, Artificial Sequence
  chemically synthesized
ttacgaaggatggaaatccc

SEQ ID NO: 57038 - DNA, 20 bp, Artificial Sequence
  chemically synthesized
ccctagaattttctcattaa

SEQ ID NO: 57039 - DNA, 20 bp, Artificial Sequence
  chemically synthesized
tctcattaagggaattgtca

SEQ ID NO: 57040 - DNA, 20 bp, Artificial Sequence
  chemically synthesized
agtatatgactcactttatg

SEQ ID NO: 57041 - DNA, 20 bp, Artificial Sequence
  chemically synthesized
attctatgctaaactttgcc

SEQ ID NO: 57042 - DNA, 20 bp, Artificial Sequence
  chemically synthesized
atactatttttaaaatatat

SEQ ID NO: 57043 - DNA, 20 bp, Artificial Sequence
  chemically synthesized
ataagaatgctagttgaaag

SEQ ID NO: 57044 - DNA, 20 bp, Artificial Sequence
  chemically synthesized
cgtcaaaatacttcccagtt

SEQ ID NO: 57045 - DNA, 20 bp, Artificial Sequence
  chemically synthesized
tacttcccagtttggggtat

SEQ ID NO: 57046 - DNA, 20 bp, Artificial Sequence
  chemically synthesized
gtcaattttctgatcatcac

SEQ ID NO: 57047 - DNA, 20 bp, Artificial Sequence
  chemically synthesized
aaggatgatcaagagaagaa

SEQ ID NO: 57048 - DNA, 20 bp, Artificial Sequence
  chemically synthesized
tccacacaatttaaattttt

SEQ ID NO: 57049 - DNA, 20 bp, Artificial Sequence
  chemically synthesized
gtctagatacctatttaaat

SEQ ID NO: 57050 - DNA, 20 bp, Artificial Sequence
  chemically synthesized
tattaattattgagcattta

SEQ ID NO: 57051 - DNA, 20 bp, Artificial Sequence
  chemically synthesized
aaatgtttcatgtatatttt

SEQ ID NO: 57052 - DNA, 20 bp, Artificial Sequence
  chemically synthesized
ttcatgtatattttcagaat

SEQ ID NO: 57053 - DNA, 20 bp, Artificial Sequence
  chemically synthesized
attcagtgattgctcatagc

SEQ ID NO: 57054 - DNA, 20 bp, Artificial Sequence
  chemically synthesized
acctgacagaggaccacagg

SEQ ID NO: 57055 - DNA, 20 bp, Artificial Sequence
  chemically synthesized
aggaccacaggtagagtatc

SEQ ID NO: 57056 - DNA, 20 bp, Artificial Sequence
  chemically synthesized
tacattaactactcttagcc

SEQ ID NO: 57057 - DNA, 20 bp, Artificial Sequence
  chemically synthesized
atttttcagctcacgtcatg

SEQ ID NO: 57058 - DNA, 20 bp, Artificial Sequence
  chemically synthesized
acattttataagtcattgaa

SEQ ID NO: 57059 - DNA, 20 bp, Artificial Sequence
  chemically synthesized
atattgtatgctttgccaga

SEQ ID NO: 57060 - DNA, 20 bp, Artificial Sequence
  chemically synthesized
ttgccagactgagtggcagt

SEQ ID NO: 57061 - DNA, 20 bp, Artificial Sequence
  chemically synthesized
cagtgggagtcctttgttat

SEQ ID NO: 57062 - DNA, 20 bp, Artificial Sequence
  chemically synthesized
atgtgggtgctgacatctgc

SEQ ID NO: 57063 - DNA, 20 bp, Artificial Sequence
  chemically synthesized
agagtgtgctgtctctattg

SEQ ID NO: 57064 - DNA, 20 bp, Artificial Sequence
  chemically synthesized
gtgaagacaaagccgaccca

SEQ ID NO: 57065 - DNA, 20 bp, Artificial Sequence
  chemically synthesized
aaagccgacccacaggatgt

SEQ ID NO: 57066 - DNA, 20 bp, Artificial Sequence
  chemically synthesized
aataatacatgttctgtgta

SEQ ID NO: 57067 - DNA, 20 bp, Artificial Sequence
  chemically synthesized
gctggtggcagaactgtgaa

SEQ ID NO: 57068 - DNA, 20 bp, Artificial Sequence
  chemically synthesized
gtggcagaactgtgaactgg

SEQ ID NO: 57069 - DNA, 20 bp, Artificial Sequence
  chemically synthesized
ctgtgaactggatggattct

SEQ ID NO: 57070 - DNA, 20 bp, Artificial Sequence
  chemically synthesized
taactttcccattttcccta

SEQ ID NO: 57071 - DNA, 20 bp, Artificial Sequence
  chemically synthesized
tggtctctgggacaatcaac

SEQ ID NO: 57072 - DNA, 20 bp, Artificial Sequence
  chemically synthesized
ggctcacacttgagcactct

SEQ ID NO: 57073 - DNA, 20 bp, Artificial Sequence
  chemically synthesized
ccagattttctcaggtccca

SEQ ID NO: 57074 - DNA, 20 bp, Artificial Sequence
  chemically synthesized
acaaaatgtagatttcatta

SEQ ID NO: 57075 - DNA, 20 bp, Artificial Sequence
  chemically synthesized
actttcttccagcatcctgc

SEQ ID NO: 57076 - DNA, 20 bp, Artificial Sequence
  chemically synthesized
atcagatactgcgtctatag

SEQ ID NO: 57077 - DNA, 20 bp, Artificial Sequence
  chemically synthesized
cacaggaagtttcaccaaat

SEQ ID NO: 57078 - DNA, 20 bp, Artificial Sequence
  chemically synthesized
taatcagtgccacttttaat

SEQ ID NO: 57079 - DNA, 20 bp, Artificial Sequence
  chemically synthesized
gacaaaaaaaatactaggga

SEQ ID NO: 57080 - DNA, 20 bp, Artificial Sequence
  chemically synthesized
aaagtgagattaggtagcat

SEQ ID NO: 57081 - DNA, 20 bp, Artificial Sequence
  chemically synthesized
actccagtttaaatacagaa

SEQ ID NO: 57082 - DNA, 20 bp, Artificial Sequence
  chemically synthesized
gaggttacttactcattatg

SEQ ID NO: 57083 - DNA, 20 bp, Artificial Sequence
  chemically synthesized
tgcccttgggcttttcttcc

SEQ ID NO: 57084 - DNA, 20 bp, Artificial Sequence
  chemically synthesized
ttactatttcatgtctgcca

SEQ ID NO: 57085 - DNA, 20 bp, Artificial Sequence
  chemically synthesized
aaggtcatgccatatttcaa

SEQ ID NO: 57086 - DNA, 20 bp, Artificial Sequence
  chemically synthesized
gagacttggaagatgcagaa

SEQ ID NO: 57087 - DNA, 20 bp, Artificial Sequence
  chemically synthesized
catgctatagccagttggaa

SEQ ID NO: 57088 - DNA, 20 bp, Artificial Sequence
  chemically synthesized
ctatagccagttggaagtga

SEQ ID NO: 57089 - DNA, 20 bp, Artificial Sequence
  chemically synthesized
agatgtcaacatcaccaatc

SEQ ID NO: 57090 - DNA, 20 bp, Artificial Sequence
  chemically synthesized
ctggaatttgaaatatggtg

SEQ ID NO: 57091 - DNA, 20 bp, Artificial Sequence
  chemically synthesized
tttttaatagccacaaaaga

SEQ ID NO: 57092 - DNA, 20 bp, Artificial Sequence
  chemically synthesized
ttaacaaatgttaacatcta

SEQ ID NO: 57093 - DNA, 20 bp, Artificial Sequence
  chemically synthesized
agactcagtcaaatgatgct

SEQ ID NO: 57094 - DNA, 20 bp, Artificial Sequence
  chemically synthesized
caaatgatgctctggatctt

SEQ ID NO: 57095 - DNA, 20 bp, Artificial Sequence
  chemically synthesized
catccctcccaacttcatat

SEQ ID NO: 57096 - DNA, 20 bp, Artificial Sequence
  chemically synthesized
agtgtcttcaagttgcatct

SEQ ID NO: 57097 - DNA, 20 bp, Artificial Sequence
  chemically synthesized
tcattccaaatagtcggcca

SEQ ID NO: 57098 - DNA, 20 bp, Artificial Sequence
  chemically synthesized
aaatagtcggccagtgaata

SEQ ID NO: 57099 - DNA, 20 bp, Artificial Sequence
  chemically synthesized
caacattaaattataattct

SEQ ID NO: 57100 - DNA, 20 bp, Artificial Sequence
  chemically synthesized
taaattttccaaaaatccac

SEQ ID NO: 57101 - DNA, 20 bp, Artificial Sequence
  chemically synthesized
tcacagaaaagacaaaggaa

SEQ ID NO: 57102 - DNA, 20 bp, Artificial Sequence
  chemically synthesized
ataagtcatctcttgttgcc

SEQ ID NO: 57103 - DNA, 20 bp, Artificial Sequence
  chemically synthesized
ggctatctccaaattcatat

SEQ ID NO: 57104 - DNA, 20 bp, Artificial Sequence
  chemically synthesized
gtctatagtccaaacaagcc

SEQ ID NO: 57105 - DNA, 20 bp, Artificial Sequence
  chemically synthesized
gagcttcctgcatctattta

SEQ ID NO: 57106 - DNA, 20 bp, Artificial Sequence
  chemically synthesized
agataaacatgctgttggac

SEQ ID NO: 57107 - DNA, 20 bp, Artificial Sequence
  chemically synthesized
acttccctaacacattttcc

SEQ ID NO: 57108 - DNA, 20 bp, Artificial Sequence
  chemically synthesized
gtccacaatctaggctggaa

SEQ ID NO: 57109 - DNA, 20 bp, Artificial Sequence
  chemically synthesized
ttaaccagctggctggtggg

SEQ ID NO: 57110 - DNA, 20 bp, Artificial Sequence
  chemically synthesized
ctgtccagagcctcctctat

SEQ ID NO: 57111 - DNA, 20 bp, Artificial Sequence
  chemically synthesized
cctctatttgggttttccaa

SEQ ID NO: 57112 - DNA, 20 bp, Artificial Sequence
  chemically synthesized
ctctttaatagatgaactcc

SEQ ID NO: 57113 - DNA, 20 bp, Artificial Sequence
  chemically synthesized
ctggagttcagagcccttaa

SEQ ID NO: 57114 - DNA, 20 bp, Artificial Sequence
  chemically synthesized
aatttcattctcaaaatcat

SEQ ID NO: 57115 - DNA, 20 bp, Artificial Sequence
  chemically synthesized
caaaatcatgggaatgagct

SEQ ID NO: 57116 - DNA, 20 bp, Artificial Sequence
  chemically synthesized
ctacaggttggggcctgtaa

SEQ ID NO: 57117 - DNA, 20 bp, Artificial Sequence
  chemically synthesized
tacaaatatattctatactc

SEQ ID NO: 57118 - DNA, 20 bp, Artificial Sequence
  chemically synthesized
gatttgggagaacagtttta

SEQ ID NO: 57119 - DNA, 20 bp, Artificial Sequence
  chemically synthesized
aacaggttcctctttttgtg

SEQ ID NO: 57120 - DNA, 20 bp, Artificial Sequence
  chemically synthesized
tcatttgagcacatgcagag

SEQ ID NO: 57121 - DNA, 20 bp, Artificial Sequence
  chemically synthesized
aagggaagccaacacacatt

SEQ ID NO: 57122 - DNA, 20 bp, Artificial Sequence
  chemically synthesized
ccttcctagaacacactcct

SEQ ID NO: 57123 - DNA, 20 bp, Artificial Sequence
  chemically synthesized
aaattacatcggttaatgga

SEQ ID NO: 57124 - DNA, 20 bp, Artificial Sequence
  chemically synthesized
cagaagaggaaaattaaatt

SEQ ID NO: 57125 - DNA, 20 bp, Artificial Sequence
  chemically synthesized
ttttattctacctttacaat

SEQ ID NO: 57126 - DNA, 20 bp, Artificial Sequence
  chemically synthesized
gtttgattacaatgcatttt

SEQ ID NO: 57127 - DNA, 20 bp, Artificial Sequence
  chemically synthesized
gtaaaatgcacaaaaattaa

SEQ ID NO: 57128 - DNA, 20 bp, Artificial Sequence
  chemically synthesized
agaacttatttttcccctag

SEQ ID NO: 57129 - DNA, 20 bp, Artificial Sequence
  chemically synthesized
tttctgatagttcttattaa

SEQ ID NO: 57130 - DNA, 20 bp, Artificial Sequence
  chemically synthesized
ttcatttaaccagtgtttgt

SEQ ID NO: 57131 - DNA, 20 bp, Artificial Sequence
  chemically synthesized
ctaagtagtaattccactgt

SEQ ID NO: 57132 - DNA, 20 bp, Artificial Sequence
  chemically synthesized
tatatatattttcatttttc

SEQ ID NO: 57133 - DNA, 20 bp, Artificial Sequence
  chemically synthesized
ttttctggggtataaaacct

SEQ ID NO: 57134 - DNA, 20 bp, Artificial Sequence
  chemically synthesized
tggggtataaaacctcagaa

SEQ ID NO: 57135 - DNA, 20 bp, Artificial Sequence
  chemically synthesized
tcatttgcaacgtttgactt

SEQ ID NO: 57136 - DNA, 20 bp, Artificial Sequence
  chemically synthesized
gctagtatctgttaaaagca

SEQ ID NO: 57137 - DNA, 20 bp, Artificial Sequence
  chemically synthesized
tatttgtccttttgttattg

SEQ ID NO: 57138 - DNA, 20 bp, Artificial Sequence
  chemically synthesized
tccttttgttattgctggat

SEQ ID NO: 57139 - DNA, 20 bp, Artificial Sequence
  chemically synthesized
actggtgcgttttaataagc

SEQ ID NO: 57140 - DNA, 20 bp, Artificial Sequence
  chemically synthesized
agagtttttttttattttga

SEQ ID NO: 57141 - DNA, 20 bp, Artificial Sequence
  chemically synthesized
tattattatactttaagttc

SEQ ID NO: 57142 - DNA, 20 bp, Artificial Sequence
  chemically synthesized
ttatcgttcaattcccatct

SEQ ID NO: 57143 - DNA, 20 bp, Artificial Sequence
  chemically synthesized
tgtccttgtgatagtttgct

SEQ ID NO: 57144 - DNA, 20 bp, Artificial Sequence
  chemically synthesized
ggttccaagtctttgctatt

SEQ ID NO: 57145 - DNA, 20 bp, Artificial Sequence
  chemically synthesized
gcagcatgatttatactcct

SEQ ID NO: 57146 - DNA, 20 bp, Artificial Sequence
  chemically synthesized
tttgggtatatacccagtaa

SEQ ID NO: 57147 - DNA, 20 bp, Artificial Sequence
  chemically synthesized
tatacccagtaatgggatgg

SEQ ID NO: 57148 - DNA, 20 bp, Artificial Sequence
  chemically synthesized
gtcaaatagtatttctagct

SEQ ID NO: 57149 - DNA, 20 bp, Artificial Sequence
  chemically synthesized
ggccattgatggctaatatc

SEQ ID NO: 57150 - DNA, 20 bp, Artificial Sequence
  chemically synthesized
accccatcaaaaagtgggca

SEQ ID NO: 57151 - DNA, 20 bp, Artificial Sequence
  chemically synthesized
ctaaaacctcctgtacacca

SEQ ID NO: 57152 - DNA, 20 bp, Artificial Sequence
  chemically synthesized
actgaatagaaatggtgaaa

SEQ ID NO: 57153 - DNA, 20 bp, Artificial Sequence
  chemically synthesized
ctttctatttcttatttgct

SEQ ID NO: 57154 - DNA, 20 bp, Artificial Sequence
  chemically synthesized
atttgctgtgagtttttaac

SEQ ID NO: 57155 - DNA, 20 bp, Artificial Sequence
  chemically synthesized
tcatgttattaaattatgct

SEQ ID NO: 57156 - DNA, 20 bp, Artificial Sequence
  chemically synthesized
caaattatattgattaattt

SEQ ID NO: 57157 - DNA, 20 bp, Artificial Sequence
  chemically synthesized
agtttgcttatacatttttg

SEQ ID NO: 57158 - DNA, 20 bp, Artificial Sequence
  chemically synthesized
ctctaatattttggccaggt

SEQ ID NO: 57159 - DNA, 20 bp, Artificial Sequence
  chemically synthesized
ttttggccaggtttgggtac

SEQ ID NO: 57160 - DNA, 20 bp, Artificial Sequence
  chemically synthesized
gcttcaaaaaataggttgag

SEQ ID NO: 57161 - DNA, 20 bp, Artificial Sequence
  chemically synthesized
ttctttccttatacatttga

SEQ ID NO: 57162 - DNA, 20 bp, Artificial Sequence
  chemically synthesized
atacatttgatagaatttac

SEQ ID NO: 57163 - DNA, 20 bp, Artificial Sequence
  chemically synthesized
cagaatataaccatcaagca

SEQ ID NO: 57164 - DNA, 20 bp, Artificial Sequence
  chemically synthesized
ttgaaatattccatttctat

SEQ ID NO: 57165 - DNA, 20 bp, Artificial Sequence
  chemically synthesized
gttttcttaaccactcttgt

SEQ ID NO: 57166 - DNA, 20 bp, Artificial Sequence
  chemically synthesized
cccacccacatacctatgaa

SEQ ID NO: 57167 - DNA, 20 bp, Artificial Sequence
  chemically synthesized
ctgcatacaggaactcctac

SEQ ID NO: 57168 - DNA, 20 bp, Artificial Sequence
  chemically synthesized
ccctcgtggaggtaaagtgc

SEQ ID NO: 57169 - DNA, 20 bp, Artificial Sequence
  chemically synthesized
tatgtgtgaaggttggagaa

SEQ ID NO: 57170 - DNA, 20 bp, Artificial Sequence
  chemically synthesized
tttatactttcctgcagtga

SEQ ID NO: 57171 - DNA, 20 bp, Artificial Sequence
  chemically synthesized
tcctgcagtgaaagaattct

SEQ ID NO: 57172 - DNA, 20 bp, Artificial Sequence
  chemically synthesized
ccccaaatccccacaacatt

SEQ ID NO: 57173 - DNA, 20 bp, Artificial Sequence
  chemically synthesized
tatatgccttctctattagt

SEQ ID NO: 57174 - DNA, 20 bp, Artificial Sequence
  chemically synthesized
agttttctacaaaaaaaaaa

SEQ ID NO: 57175 - DNA, 20 bp, Artificial Sequence
  chemically synthesized
aaaaaaaagggaatcaatag

SEQ ID NO: 57176 - DNA, 20 bp, Artificial Sequence
  chemically synthesized
agtaggctagaaattcagga

SEQ ID NO: 57177 - DNA, 20 bp, Artificial Sequence
  chemically synthesized
aatactcattagagataaga

SEQ ID NO: 57178 - DNA, 20 bp, Artificial Sequence
  chemically synthesized
cagcattggccatgaccagt

SEQ ID NO: 57179 - DNA, 20 bp, Artificial Sequence
  chemically synthesized
agaactggctttgacaacaa

SEQ ID NO: 57180 - DNA, 20 bp, Artificial Sequence
  chemically synthesized
atctctgaggttataaaaag

SEQ ID NO: 57181 - DNA, 20 bp, Artificial Sequence
  chemically synthesized
catttggagatgaggtccct

SEQ ID NO: 57182 - DNA, 20 bp, Artificial Sequence
  chemically synthesized
aaatatacattcagttctct

SEQ ID NO: 57183 - DNA, 20 bp, Artificial Sequence
  chemically synthesized
atggcataggcccctttgga

SEQ ID NO: 57184 - DNA, 20 bp, Artificial Sequence
  chemically synthesized
gcccctttggaaggggtagt

SEQ ID NO: 57185 - DNA, 20 bp, Artificial Sequence
  chemically synthesized
ttaatggaactaccatttaa

SEQ ID NO: 57186 - DNA, 20 bp, Artificial Sequence
  chemically synthesized
accatttaagtgagtttaaa

SEQ ID NO: 57187 - DNA, 20 bp, Artificial Sequence
  chemically synthesized
tgccttcccacttctcttag

SEQ ID NO: 57188 - DNA, 20 bp, Artificial Sequence
  chemically synthesized
tatgattattcagattgtac

SEQ ID NO: 57189 - DNA, 20 bp, Artificial Sequence
  chemically synthesized
tccctctgaagtattgcttg

SEQ ID NO: 57190 - DNA, 20 bp, Artificial Sequence
  chemically synthesized
gaaacaaaagctaaatgaag

SEQ ID NO: 57191 - DNA, 20 bp, Artificial Sequence
  chemically synthesized
aaatgaagaagagtgagcct

SEQ ID NO: 57192 - DNA, 20 bp, Artificial Sequence
  chemically synthesized
tgagcctcagaatcaaagaa

SEQ ID NO: 57193 - DNA, 20 bp, Artificial Sequence
  chemically synthesized
tcagaatcaaagaactggat

SEQ ID NO: 57194 - DNA, 20 bp, Artificial Sequence
  chemically synthesized
ttaaaccattttacaggggc

SEQ ID NO: 57195 - DNA, 20 bp, Artificial Sequence
  chemically synthesized
tcagctcagaaggccttgtt

SEQ ID NO: 57196 - DNA, 20 bp, Artificial Sequence
  chemically synthesized
tcagaaggccttgttgagaa

SEQ ID NO: 57197 - DNA, 20 bp, Artificial Sequence
  chemically synthesized
tccccttttacaacccatcc

SEQ ID NO: 57198 - DNA, 20 bp, Artificial Sequence
  chemically synthesized
agaaacaggcagtcaccact

SEQ ID NO: 57199 - DNA, 20 bp, Artificial Sequence
  chemically synthesized
aaatcccagctcacactcta

SEQ ID NO: 57200 - DNA, 20 bp, Artificial Sequence
  chemically synthesized
taggaaatcaatacctttct

SEQ ID NO: 57201 - DNA, 20 bp, Artificial Sequence
  chemically synthesized
gcagtagggagaggcccaag

SEQ ID NO: 57202 - DNA, 20 bp, Artificial Sequence
  chemically synthesized
tggaaggtcttagccagggc

SEQ ID NO: 57203 - DNA, 20 bp, Artificial Sequence
  chemically synthesized
atataacctaattttattac

SEQ ID NO: 57204 - DNA, 20 bp, Artificial Sequence
  chemically synthesized
ttattacaagaataaagact

SEQ ID NO: 57205 - DNA, 20 bp, Artificial Sequence
  chemically synthesized
tccaatattcaaaaggcaaa

SEQ ID NO: 57206 - DNA, 20 bp, Artificial Sequence
  chemically synthesized
ggtttatttctcactcacat

SEQ ID NO: 57207 - DNA, 20 bp, Artificial Sequence
  chemically synthesized
tcactcacatcagagtcaaa

SEQ ID NO: 57208 - DNA, 20 bp, Artificial Sequence
  chemically synthesized
ggtggaagaggacggagcag

SEQ ID NO: 57209 - DNA, 20 bp, Artificial Sequence
  chemically synthesized
acggagcagaggagtcacac

SEQ ID NO: 57210 - DNA, 20 bp, Artificial Sequence
  chemically synthesized
acatgggtgtgtgtctggcc

SEQ ID NO: 57211 - DNA, 20 bp, Artificial Sequence
  chemically synthesized
gtgtctggcccagggtggaa

SEQ ID NO: 57212 - DNA, 20 bp, Artificial Sequence
  chemically synthesized
ccccactgcaagagaggctg

SEQ ID NO: 57213 - DNA, 20 bp, Artificial Sequence
  chemically synthesized
gagaggctggagaatgcgga

SEQ ID NO: 57214 - DNA, 20 bp, Artificial Sequence
  chemically synthesized
caagaagaagaaatggtttt

SEQ ID NO: 57215 - DNA, 20 bp, Artificial Sequence
  chemically synthesized
tggccatttactgacacaaa

SEQ ID NO: 57216 - DNA, 20 bp, Artificial Sequence
  chemically synthesized
caaagtgacttgcagaggag

SEQ ID NO: 57217 - DNA, 20 bp, Artificial Sequence
  chemically synthesized
ttccttggctgccctttaga

SEQ ID NO: 57218 - DNA, 20 bp, Artificial Sequence
  chemically synthesized
aacctgaggctccttttgac

SEQ ID NO: 57219 - DNA, 20 bp, Artificial Sequence
  chemically synthesized
atgtagcttaccgccaggaa

SEQ ID NO: 57220 - DNA, 20 bp, Artificial Sequence
  chemically synthesized
cattaataaaataaaaactt

SEQ ID NO: 57221 - DNA, 20 bp, Artificial Sequence
  chemically synthesized
caaaatctaccttctactga

SEQ ID NO: 57222 - DNA, 20 bp, Artificial Sequence
  chemically synthesized
aatattggccccatgaaaac

SEQ ID NO: 57223 - DNA, 20 bp, Artificial Sequence
  chemically synthesized
tctgctctaattttggtctt

SEQ ID NO: 57224 - DNA, 20 bp, Artificial Sequence
  chemically synthesized
ttcagaatgtttctacatta

SEQ ID NO: 57225 - DNA, 20 bp, Artificial Sequence
  chemically synthesized
aatgtttctacattagtgag

SEQ ID NO: 57226 - DNA, 20 bp, Artificial Sequence
  chemically synthesized
tttttacccttcataatcag

SEQ ID NO: 57227 - DNA, 20 bp, Artificial Sequence
  chemically synthesized
tcttcatgatttgttgaggt

SEQ ID NO: 57228 - DNA, 20 bp, Artificial Sequence
  chemically synthesized
ttttggggaggaggtggcag

SEQ ID NO: 57229 - DNA, 20 bp, Artificial Sequence
  chemically synthesized
gggaggaggtggcagaagag

SEQ ID NO: 57230 - DNA, 20 bp, Artificial Sequence
  chemically synthesized
agcaacttagtggagaaagg

SEQ ID NO: 57231 - DNA, 20 bp, Artificial Sequence
  chemically synthesized
tagtggagaaaggaaggatt

SEQ ID NO: 57232 - DNA, 20 bp, Artificial Sequence
  chemically synthesized
tagataaattcaataaatac

SEQ ID NO: 57233 - DNA, 20 bp, Artificial Sequence
  chemically synthesized
atacatgaatttttttgaga

SEQ ID NO: 57234 - DNA, 20 bp, Artificial Sequence
  chemically synthesized
tcttgctcagtcatccaggt

SEQ ID NO: 57235 - DNA, 20 bp, Artificial Sequence
  chemically synthesized
ctcactgcaacctccgcctc

SEQ ID NO: 57236 - DNA, 20 bp, Artificial Sequence
  chemically synthesized
tttttgtatttttgtagagc

SEQ ID NO: 57237 - DNA, 20 bp, Artificial Sequence
  chemically synthesized
acctcagcctcccaaagtgc

SEQ ID NO: 57238 - DNA, 20 bp, Artificial Sequence
  chemically synthesized
caaagctgtagaagaaaaga

SEQ ID NO: 57239 - DNA, 20 bp, Artificial Sequence
  chemically synthesized
gggaaaaatctcataaagta

SEQ ID NO: 57240 - DNA, 20 bp, Artificial Sequence
  chemically synthesized
ctttttatctgtcaaattga

SEQ ID NO: 57241 - DNA, 20 bp, Artificial Sequence
  chemically synthesized
catctccccttaatatgtga

SEQ ID NO: 57242 - DNA, 20 bp, Artificial Sequence
  chemically synthesized
ctgggcagtgcctaactcac

SEQ ID NO: 57243 - DNA, 20 bp, Artificial Sequence
  chemically synthesized
acaaatacgagacaacttca

SEQ ID NO: 57244 - DNA, 20 bp, Artificial Sequence
  chemically synthesized
gagaatgcttatgggactaa

SEQ ID NO: 57245 - DNA, 20 bp, Artificial Sequence
  chemically synthesized
aacacctcttttcccatcct

SEQ ID NO: 57246 - DNA, 20 bp, Artificial Sequence
  chemically synthesized
tgcactctactctctagcat

SEQ ID NO: 57247 - DNA, 20 bp, Artificial Sequence
  chemically synthesized
atcactattttaaaggcttc

SEQ ID NO: 57248 - DNA, 20 bp, Artificial Sequence
  chemically synthesized
ctattttaaaggcttctgga

SEQ ID NO: 57249 - DNA, 20 bp, Artificial Sequence
  chemically synthesized
ttaaaggcttctggagtgaa

SEQ ID NO: 57250 - DNA, 20 bp, Artificial Sequence
  chemically synthesized
gatcaataatagctcaggta

SEQ ID NO: 57251 - DNA, 20 bp, Artificial Sequence
  chemically synthesized
gctcaggtaaggaatggtgg

SEQ ID NO: 57252 - DNA, 20 bp, Artificial Sequence
  chemically synthesized
tggtagagtttttgttccct

SEQ ID NO: 57253 - DNA, 20 bp, Artificial Sequence
  chemically synthesized
gcactcttacactttctttg

SEQ ID NO: 57254 - DNA, 20 bp, Artificial Sequence
  chemically synthesized
gtgaagaacaaggaagcaga

SEQ ID NO: 57255 - DNA, 20 bp, Artificial Sequence
  chemically synthesized
gaacaaggaagcagagggag

SEQ ID NO: 57256 - DNA, 20 bp, Artificial Sequence
  chemically synthesized
gagtggggtccttattagct

SEQ ID NO: 57257 - DNA, 20 bp, Artificial Sequence
  chemically synthesized
tcctatgtctccttttccag

SEQ ID NO: 57258 - DNA, 20 bp, Artificial Sequence
  chemically synthesized
atgtctttgggactggaact

SEQ ID NO: 57259 - DNA, 20 bp, Artificial Sequence
  chemically synthesized
tcctccctaaaatttgcaac

SEQ ID NO: 57260 - DNA, 20 bp, Artificial Sequence
  chemically synthesized
ctacccccactgcatggcta

SEQ ID NO: 57261 - DNA, 20 bp, Artificial Sequence
  chemically synthesized
attcttgctttccaggggag

SEQ ID NO: 57262 - DNA, 20 bp, Artificial Sequence
  chemically synthesized
tcttactaaccatcagcatt

SEQ ID NO: 57263 - DNA, 20 bp, Artificial Sequence
  chemically synthesized
gaccttcttcaactaataaa

SEQ ID NO: 57264 - DNA, 20 bp, Artificial Sequence
  chemically synthesized
taataaagagggtgattgtg

SEQ ID NO: 57265 - DNA, 20 bp, Artificial Sequence
  chemically synthesized
attgatgagaaaaccacaaa

SEQ ID NO: 57266 - DNA, 20 bp, Artificial Sequence
  chemically synthesized
aaaggggattaaggcatttc

SEQ ID NO: 57267 - DNA, 20 bp, Artificial Sequence
  chemically synthesized
agtatccctatctatcctca

SEQ ID NO: 57268 - DNA, 20 bp, Artificial Sequence
  chemically synthesized
gcaaacgctgtccccaaagt

SEQ ID NO: 57269 - DNA, 20 bp, Artificial Sequence
  chemically synthesized
actttaagcatataaattca

SEQ ID NO: 57270 - DNA, 20 bp, Artificial Sequence
  chemically synthesized
taaattacttactattctag

SEQ ID NO: 57271 - DNA, 20 bp, Artificial Sequence
  chemically synthesized
ggcagaaggctacatatccc

SEQ ID NO: 57272 - DNA, 20 bp, Artificial Sequence
  chemically synthesized
gaaagtactaagcaatttcc

SEQ ID NO: 57273 - DNA, 20 bp, Artificial Sequence
  chemically synthesized
cttccaccaaaattagctgc

SEQ ID NO: 57274 - DNA, 20 bp, Artificial Sequence
  chemically synthesized
aaaaagacaacacttaaatt

SEQ ID NO: 57275 - DNA, 20 bp, Artificial Sequence
  chemically synthesized
cttaaattgggagtaaacaa

SEQ ID NO: 57276 - DNA, 20 bp, Artificial Sequence
  chemically synthesized
ttattgtcatgtcttgttca

SEQ ID NO: 57277 - DNA, 20 bp, Artificial Sequence
  chemically synthesized
tgtcatgtcttgttcacaga

SEQ ID NO: 57278 - DNA, 20 bp, Artificial Sequence
  chemically synthesized
gtctctggtccaacccctcc

SEQ ID NO: 57279 - DNA, 20 bp, Artificial Sequence
  chemically synthesized
tgttcttctgattccaagct

SEQ ID NO: 57280 - DNA, 20 bp, Artificial Sequence
  chemically synthesized
ctatcaatgttctctgattt

SEQ ID NO: 57281 - DNA, 20 bp, Artificial Sequence
  chemically synthesized
tttgtaagaaaccaagaaaa

SEQ ID NO: 57282 - DNA, 20 bp, Artificial Sequence
  chemically synthesized
ttggcaacatcccagtggcc

SEQ ID NO: 57283 - DNA, 20 bp, Artificial Sequence
  chemically synthesized
tatttgattcatcctgtaac

SEQ ID NO: 57284 - DNA, 20 bp, Artificial Sequence
  chemically synthesized
tctcagaagctccagaagca

SEQ ID NO: 57285 - DNA, 20 bp, Artificial Sequence
  chemically synthesized
ccctttctcctttttctgtg

SEQ ID NO: 57286 - DNA, 20 bp, Artificial Sequence
  chemically synthesized
tttctgtgcagaatttaaat

SEQ ID NO: 57287 - DNA, 20 bp, Artificial Sequence
  chemically synthesized
ttcctggactgccagattca

SEQ ID NO: 57288 - DNA, 20 bp, Artificial Sequence
  chemically synthesized
tggactgccagattcatagg

SEQ ID NO: 57289 - DNA, 20 bp, Artificial Sequence
  chemically synthesized
tacgtttcctcagcaactag

SEQ ID NO: 57290 - DNA, 20 bp, Artificial Sequence
  chemically synthesized
ctgagaagcagaggcttgga

SEQ ID NO: 57291 - DNA, 20 bp, Artificial Sequence
  chemically synthesized
agagccccaactgcccatct

SEQ ID NO: 57292 - DNA, 20 bp, Artificial Sequence
  chemically synthesized
catccctcacatgcctggct

SEQ ID NO: 57293 - DNA, 20 bp, Artificial Sequence
  chemically synthesized
ccaggtccctagactgcagg

SEQ ID NO: 57294 - DNA, 20 bp, Artificial Sequence
  chemically synthesized
tagactgcagggagagtggc

SEQ ID NO: 57295 - DNA, 20 bp, Artificial Sequence
  chemically synthesized
cctccattttctctccaatc

SEQ ID NO: 57296 - DNA, 20 bp, Artificial Sequence
  chemically synthesized
tgacattgaacccagttgct

SEQ ID NO: 57297 - DNA, 20 bp, Artificial Sequence
  chemically synthesized
tcagcccattcttacttccc

SEQ ID NO: 57298 - DNA, 20 bp, Artificial Sequence
  chemically synthesized
gatgatttaaaagggaagtc

SEQ ID NO: 57299 - DNA, 20 bp, Artificial Sequence
  chemically synthesized
cattgctttgaccactcttc

SEQ ID NO: 57300 - DNA, 20 bp, Artificial Sequence
  chemically synthesized
tgagttcagtggcactcaac

SEQ ID NO: 57301 - DNA, 20 bp, Artificial Sequence
  chemically synthesized
gagcatcctgcttctaccat

SEQ ID NO: 57302 - DNA, 20 bp, Artificial Sequence
  chemically synthesized
tatttaaaaaaaaaagagga

SEQ ID NO: 57303 - DNA, 20 bp, Artificial Sequence
  chemically synthesized
aaaaaaagaggaaagaatga

SEQ ID NO: 57304 - DNA, 20 bp, Artificial Sequence
  chemically synthesized
aagagtaaaggaaatgattg

SEQ ID NO: 57305 - DNA, 20 bp, Artificial Sequence
  chemically synthesized
aaaatgatagttgccattat

SEQ ID NO: 57306 - DNA, 20 bp, Artificial Sequence
  chemically synthesized
gatcattaaattcagaacta

SEQ ID NO: 57307 - DNA, 20 bp, Artificial Sequence
  chemically synthesized
ggggccaagatatgatggct

SEQ ID NO: 57308 - DNA, 20 bp, Artificial Sequence
  chemically synthesized
cactgaggactgccccattc

SEQ ID NO: 57309 - DNA, 20 bp, Artificial Sequence
  chemically synthesized
gtgccaaacgtcactagtaa

SEQ ID NO: 57310 - DNA, 20 bp, Artificial Sequence
  chemically synthesized
tagataatttatgatccaaa

SEQ ID NO: 57311 - DNA, 20 bp, Artificial Sequence
  chemically synthesized
agagggggagaaacagtctt

SEQ ID NO: 57312 - DNA, 20 bp, Artificial Sequence
  chemically synthesized
ttctgaaaataggctcaaga

SEQ ID NO: 57313 - DNA, 20 bp, Artificial Sequence
  chemically synthesized
aactgtcgctgaccctggac

SEQ ID NO: 57314 - DNA, 20 bp, Artificial Sequence
  chemically synthesized
cctggacatgggtacgtttg

SEQ ID NO: 57315 - DNA, 20 bp, Artificial Sequence
  chemically synthesized
tgccacaaacttcagggaga

SEQ ID NO: 57316 - DNA, 20 bp, Artificial Sequence
  chemically synthesized
aagagttacaagtacatgca

SEQ ID NO: 57317 - DNA, 20 bp, Artificial Sequence
  chemically synthesized
ctaactcaaagtcaaggcaa

SEQ ID NO: 57318 - DNA, 20 bp, Artificial Sequence
  chemically synthesized
gctgcacagaaaactagaga

SEQ ID NO: 57319 - DNA, 20 bp, Artificial Sequence
  chemically synthesized
gttgctactgtttttctgtt

SEQ ID NO: 57320 - DNA, 20 bp, Artificial Sequence
  chemically synthesized
tgttttgttttgtgttgtct

SEQ ID NO: 57321 - DNA, 20 bp, Artificial Sequence
  chemically synthesized
tgttttgtgttgtctgtgaa

SEQ ID NO: 57322 - DNA, 20 bp, Artificial Sequence
  chemically synthesized
ctgtgaatggggttttaact

SEQ ID NO: 57323 - DNA, 20 bp, Artificial Sequence
  chemically synthesized
gaatggggttttaactgtgg

SEQ ID NO: 57324 - DNA, 20 bp, Artificial Sequence
  chemically synthesized
cagaccatcttattcttcag

SEQ ID NO: 57325 - DNA, 20 bp, Artificial Sequence
  chemically synthesized
ggggacctaaagacacataa

SEQ ID NO: 57326 - DNA, 20 bp, Artificial Sequence
  chemically synthesized
aaatttacatggaggaaaag

SEQ ID NO: 57327 - DNA, 20 bp, Artificial Sequence
  chemically synthesized
tctttaccttttgtagaaat

SEQ ID NO: 57328 - DNA, 20 bp, Artificial Sequence
  chemically synthesized
tgtttggcatatgttatctt

SEQ ID NO: 57329 - DNA, 20 bp, Artificial Sequence
  chemically synthesized
atttggtccaacaaacatga

SEQ ID NO: 57330 - DNA, 20 bp, Artificial Sequence
  chemically synthesized
tccttcaatgtggtttccat

SEQ ID NO: 57331 - DNA, 20 bp, Artificial Sequence
  chemically synthesized
gagacttggtacgggccagg

SEQ ID NO: 57332 - DNA, 20 bp, Artificial Sequence
  chemically synthesized
gcgaaatgtttgtaatgcat

SEQ ID NO: 57333 - DNA, 20 bp, Artificial Sequence
  chemically synthesized
gatcttcactgtagtgaaca

SEQ ID NO: 57334 - DNA, 20 bp, Artificial Sequence
  chemically synthesized
agtgaacaatggatatttta

SEQ ID NO: 57335 - DNA, 20 bp, Artificial Sequence
  chemically synthesized
aaaggctggtaggaaatcag

SEQ ID NO: 57336 - DNA, 20 bp, Artificial Sequence
  chemically synthesized
aggaaatcagctgaatcagc

SEQ ID NO: 57337 - DNA, 20 bp, Artificial Sequence
  chemically synthesized
ttgtccctaggtatataatc

SEQ ID NO: 57338 - DNA, 20 bp, Artificial Sequence
  chemically synthesized
tgccaaacaacattgaaaca

SEQ ID NO: 57339 - DNA, 20 bp, Artificial Sequence
  chemically synthesized
agagattgtctatttatacc

SEQ ID NO: 57340 - DNA, 20 bp, Artificial Sequence
  chemically synthesized
ttctgacttaacgtgtgagg

SEQ ID NO: 57341 - DNA, 20 bp, Artificial Sequence
  chemically synthesized
aaatacttcaaagaacttct

SEQ ID NO: 57342 - DNA, 20 bp, Artificial Sequence
  chemically synthesized
aggttttgcaatttatgagg

SEQ ID NO: 57343 - DNA, 20 bp, Artificial Sequence
  chemically synthesized
atgcctatcaaggaggtgga

SEQ ID NO: 57344 - DNA, 20 bp, Artificial Sequence
  chemically synthesized
aaaagcactaggcaaaccta

SEQ ID NO: 57345 - DNA, 20 bp, Artificial Sequence
  chemically synthesized
gaaagtaaaacattcacctg

SEQ ID NO: 57346 - DNA, 20 bp, Artificial Sequence
  chemically synthesized
tttgtggttctgtgaacagc

SEQ ID NO: 57347 - DNA, 20 bp, Artificial Sequence
  chemically synthesized
ggtttggaggcctgtgggag

SEQ ID NO: 57348 - DNA, 20 bp, Artificial Sequence
  chemically synthesized
attactcagttgccttgact

SEQ ID NO: 57349 - DNA, 20 bp, Artificial Sequence
  chemically synthesized
tggagaacttgggacaattt

SEQ ID NO: 57350 - DNA, 20 bp, Artificial Sequence
  chemically synthesized
gaacttgggacaatttaggg

SEQ ID NO: 57351 - DNA, 20 bp, Artificial Sequence
  chemically synthesized
atttagggatgaatttaggt

SEQ ID NO: 57352 - DNA, 20 bp, Artificial Sequence
  chemically synthesized
gtagtgtctatacacatggg

SEQ ID NO: 57353 - DNA, 20 bp, Artificial Sequence
  chemically synthesized
tcgtcaaacgtacccatgtc

SEQ ID NO: 57354 - DNA, 20 bp, Artificial Sequence
  chemically synthesized
agtttcctctgagatcatgg

SEQ ID NO: 57355 - DNA, 20 bp, Artificial Sequence
  chemically synthesized
gagatcatggacggatgcag

SEQ ID NO: 57356 - DNA, 20 bp, Artificial Sequence
  chemically synthesized
cagttgggtggtagcagcaa

SEQ ID NO: 57357 - DNA, 20 bp, Artificial Sequence
  chemically synthesized
ggtaacaaacaagagaaatt

SEQ ID NO: 57358 - DNA, 20 bp, Artificial Sequence
  chemically synthesized
gtttttgctcattgtcccgg

SEQ ID NO: 57359 - DNA, 20 bp, Artificial Sequence
  chemically synthesized
actttccaaactgactcagt

SEQ ID NO: 57360 - DNA, 20 bp, Artificial Sequence
  chemically synthesized
actagtgacgtttggcactc

SEQ ID NO: 57361 - DNA, 20 bp, Artificial Sequence
  chemically synthesized
agttacttaactccttagtt

SEQ ID NO: 57362 - DNA, 20 bp, Artificial Sequence
  chemically synthesized
atttaatgatctataaaaaa

SEQ ID NO: 57363 - DNA, 20 bp, Artificial Sequence
  chemically synthesized
tagtaattgcacacacctcc

SEQ ID NO: 57364 - DNA, 20 bp, Artificial Sequence
  chemically synthesized
acacctcccaggattattgt

SEQ ID NO: 57365 - DNA, 20 bp, Artificial Sequence
  chemically synthesized
tcccaggattattgtcagga

SEQ ID NO: 57366 - DNA, 20 bp, Artificial Sequence
  chemically synthesized
cgcagagcacttgcaaagca

SEQ ID NO: 57367 - DNA, 20 bp, Artificial Sequence
  chemically synthesized
cctcttttttttttaaatag

SEQ ID NO: 57368 - DNA, 20 bp, Artificial Sequence
  chemically synthesized
ttttttaaatagctgaatca

SEQ ID NO: 57369 - DNA, 20 bp, Artificial Sequence
  chemically synthesized
ccaaatccacatggtagaag

SEQ ID NO: 57370 - DNA, 20 bp, Artificial Sequence
  chemically synthesized
caggatgctcttgactcatg

SEQ ID NO: 57371 - DNA, 20 bp, Artificial Sequence
  chemically synthesized
tgagtgccactgaactcagg

SEQ ID NO: 57372 - DNA, 20 bp, Artificial Sequence
  chemically synthesized
gagtggtcaaagcaatgttt

SEQ ID NO: 57373 - DNA, 20 bp, Artificial Sequence
  chemically synthesized
gaatcttgcagactgtgtag

SEQ ID NO: 57374 - DNA, 20 bp, Artificial Sequence
  chemically synthesized
tcgctcacggtaagttcagt

SEQ ID NO: 57375 - DNA, 20 bp, Artificial Sequence
  chemically synthesized
tgatttgatcccagggaagt

SEQ ID NO: 57376 - DNA, 20 bp, Artificial Sequence
  chemically synthesized
aatgggctgaccctgagcaa

SEQ ID NO: 57377 - DNA, 20 bp, Artificial Sequence
  chemically synthesized
tgagcaactgggttcaatgt

SEQ ID NO: 57378 - DNA, 20 bp, Artificial Sequence
  chemically synthesized
tctagggacctggaagagga

SEQ ID NO: 57379 - DNA, 20 bp, Artificial Sequence
  chemically synthesized
cattcccagccaggcatgtg

SEQ ID NO: 57380 - DNA, 20 bp, Artificial Sequence
  chemically synthesized
cccagccaggcatgtgaggg

SEQ ID NO: 57381 - DNA, 20 bp, Artificial Sequence
  chemically synthesized
gaatctcttccaaagctttc

SEQ ID NO: 57382 - DNA, 20 bp, Artificial Sequence
  chemically synthesized
ccttccacttcatctctagc

SEQ ID NO: 57383 - DNA, 20 bp, Artificial Sequence
  chemically synthesized
gcttgaatgtcatccaccct

SEQ ID NO: 57384 - DNA, 20 bp, Artificial Sequence
  chemically synthesized
ctggcagtccaggaaacttt

SEQ ID NO: 57385 - DNA, 20 bp, Artificial Sequence
  chemically synthesized
ttctgcacagaaaaaggaga

SEQ ID NO: 57386 - DNA, 20 bp, Artificial Sequence
  chemically synthesized
caccatcaaatgttcagttc

SEQ ID NO: 57387 - DNA, 20 bp, Artificial Sequence
  chemically synthesized
tcagttcaggagtaggtcta

SEQ ID NO: 57388 - DNA, 20 bp, Artificial Sequence
  chemically synthesized
gtctatagagttttctgaca

SEQ ID NO: 57389 - DNA, 20 bp, Artificial Sequence
  chemically synthesized
ttttctgacagggaatgtca

SEQ ID NO: 57390 - DNA, 20 bp, Artificial Sequence
  chemically synthesized
tttcagttccctactgcagc

SEQ ID NO: 57391 - DNA, 20 bp, Artificial Sequence
  chemically synthesized
cttaggagggaccctagtta

SEQ ID NO: 57392 - DNA, 20 bp, Artificial Sequence
  chemically synthesized
ggagggaccctagttacagg

SEQ ID NO: 57393 - DNA, 20 bp, Artificial Sequence
  chemically synthesized
ggttcaactgttccttgtcc

SEQ ID NO: 57394 - DNA, 20 bp, Artificial Sequence
  chemically synthesized
ggaatatcattcttggccac

SEQ ID NO: 57395 - DNA, 20 bp, Artificial Sequence
  chemically synthesized
ggtttcttacaaagatgttc

SEQ ID NO: 57396 - DNA, 20 bp, Artificial Sequence
  chemically synthesized
agagaacattgatagatgaa

SEQ ID NO: 57397 - DNA, 20 bp, Artificial Sequence
  chemically synthesized
tggcagagggcacaggcaca

SEQ ID NO: 57398 - DNA, 20 bp, Artificial Sequence
  chemically synthesized
cttcccacttattctgagct

SEQ ID NO: 57399 - DNA, 20 bp, Artificial Sequence
  chemically synthesized
cttggctctaacacaattag

SEQ ID NO: 57400 - DNA, 20 bp, Artificial Sequence
  chemically synthesized
ggggccctatcaattcaagg

SEQ ID NO: 57401 - DNA, 20 bp, Artificial Sequence
  chemically synthesized
gctaattttggtggaagtgg

SEQ ID NO: 57402 - DNA, 20 bp, Artificial Sequence
  chemically synthesized
ccaggcagtacttttcaaat

SEQ ID NO: 57403 - DNA, 20 bp, Artificial Sequence
  chemically synthesized
attagggtatttgtaatcct

SEQ ID NO: 57404 - DNA, 20 bp, Artificial Sequence
  chemically synthesized
ttctgccaagggcattctcc

SEQ ID NO: 57405 - DNA, 20 bp, Artificial Sequence
  chemically synthesized
gaaacaaacatagccttagc

SEQ ID NO: 57406 - DNA, 20 bp, Artificial Sequence
  chemically synthesized
ggattagtataaaaaatccc

SEQ ID NO: 57407 - DNA, 20 bp, Artificial Sequence
  chemically synthesized
aagtacattgtgcatttgcc

SEQ ID NO: 57408 - DNA, 20 bp, Artificial Sequence
  chemically synthesized
gcttgggaaacattgcatta

SEQ ID NO: 57409 - DNA, 20 bp, Artificial Sequence
  chemically synthesized
attaactgtggaaattcgct

SEQ ID NO: 57410 - DNA, 20 bp, Artificial Sequence
  chemically synthesized
gaaattcgctgaggatagat

SEQ ID NO: 57411 - DNA, 20 bp, Artificial Sequence
  chemically synthesized
aatgctgatggttagtaaga

SEQ ID NO: 57412 - DNA, 20 bp, Artificial Sequence
  chemically synthesized
atccatctcccctggaaagc

SEQ ID NO: 57413 - DNA, 20 bp, Artificial Sequence
  chemically synthesized
gcattcagtagccatgcagt

SEQ ID NO: 57414 - DNA, 20 bp, Artificial Sequence
  chemically synthesized
cagtagccatgcagtggggg

SEQ ID NO: 57415 - DNA, 20 bp, Artificial Sequence
  chemically synthesized
atgcagtgggggtagggtct

SEQ ID NO: 57416 - DNA, 20 bp, Artificial Sequence
  chemically synthesized
catatttgacagctttatgg

SEQ ID NO: 57417 - DNA, 20 bp, Artificial Sequence
  chemically synthesized
ttggtttaaaaggcattgac

SEQ ID NO: 57418 - DNA, 20 bp, Artificial Sequence
  chemically synthesized
ccagagcaggagatgatgag

SEQ ID NO: 57419 - DNA, 20 bp, Artificial Sequence
  chemically synthesized
gccttagagacagcagccat

SEQ ID NO: 57420 - DNA, 20 bp, Artificial Sequence
  chemically synthesized
aaattggttaactggacgta

SEQ ID NO: 57421 - DNA, 20 bp, Artificial Sequence
  chemically synthesized
gttaactggacgtagtgggt

SEQ ID NO: 57422 - DNA, 20 bp, Artificial Sequence
  chemically synthesized
caaaatgtatggcagcttcc

SEQ ID NO: 57423 - DNA, 20 bp, Artificial Sequence
  chemically synthesized
tcattctccaaagaaagtgt

SEQ ID NO: 57424 - DNA, 20 bp, Artificial Sequence
  chemically synthesized
aaagtgtaagagtgccctcc

SEQ ID NO: 57425 - DNA, 20 bp, Artificial Sequence
  chemically synthesized
cctgagctattattgatctc

SEQ ID NO: 57426 - DNA, 20 bp, Artificial Sequence
  chemically synthesized
aagcctttaaaatagtgatc

SEQ ID NO: 57427 - DNA, 20 bp, Artificial Sequence
  chemically synthesized
ctttaaaatagtgatcaggg

SEQ ID NO: 57428 - DNA, 20 bp, Artificial Sequence
  chemically synthesized
ccggttggagctttctctgc

SEQ ID NO: 57429 - DNA, 20 bp, Artificial Sequence
  chemically synthesized
gcaggagtgtcagctttgtg

SEQ ID NO: 57430 - DNA, 20 bp, Artificial Sequence
  chemically synthesized
ctggataaattcacatgcta

SEQ ID NO: 57431 - DNA, 20 bp, Artificial Sequence
  chemically synthesized
taaattcacatgctagagag

SEQ ID NO: 57432 - DNA, 20 bp, Artificial Sequence
  chemically synthesized
gtagagtgcagttacattct

SEQ ID NO: 57433 - DNA, 20 bp, Artificial Sequence
  chemically synthesized
atctcccaaatcatttcaat

SEQ ID NO: 57434 - DNA, 20 bp, Artificial Sequence
  chemically synthesized
tgaagttgtctcgtatttgt

SEQ ID NO: 57435 - DNA, 20 bp, Artificial Sequence
  chemically synthesized
taaggagctctgatacgtaa

SEQ ID NO: 57436 - DNA, 20 bp, Artificial Sequence
  chemically synthesized
gtcaacagcaaaattaggga

SEQ ID NO: 57437 - DNA, 20 bp, Artificial Sequence
  chemically synthesized
ggacagaatctgagcttata

SEQ ID NO: 57438 - DNA, 20 bp, Artificial Sequence
  chemically synthesized
ctgagcttataaaggatgtt

SEQ ID NO: 57439 - DNA, 20 bp, Artificial Sequence
  chemically synthesized
tgttgtgagtggtcaaggag

SEQ ID NO: 57440 - DNA, 20 bp, Artificial Sequence
  chemically synthesized
tcaaggaggagagtgaaatg

SEQ ID NO: 57441 - DNA, 20 bp, Artificial Sequence
  chemically synthesized
aaatgatgggtcttattcag

SEQ ID NO: 57442 - DNA, 20 bp, Artificial Sequence
  chemically synthesized
caggtgagttaggcactgcc

SEQ ID NO: 57443 - DNA, 20 bp, Artificial Sequence
  chemically synthesized
gttaggttaggttagtgagc

SEQ ID NO: 57444 - DNA, 20 bp, Artificial Sequence
  chemically synthesized
gaaagacgccattttacatt

SEQ ID NO: 57445 - DNA, 20 bp, Artificial Sequence
  chemically synthesized
agttcattttcatatattta

SEQ ID NO: 57446 - DNA, 20 bp, Artificial Sequence
  chemically synthesized
ttgtttttttaatgatttat

SEQ ID NO: 57447 - DNA, 20 bp, Artificial Sequence
  chemically synthesized
tcttctacagctttgatgct

SEQ ID NO: 57448 - DNA, 20 bp, Artificial Sequence
  chemically synthesized
tataatttttctaatttgtt

SEQ ID NO: 57449 - DNA, 20 bp, Artificial Sequence
  chemically synthesized
tgggcagatcacctgaggtg

SEQ ID NO: 57450 - DNA, 20 bp, Artificial Sequence
  chemically synthesized
aaaattagccgggcatgatg

SEQ ID NO: 57451 - DNA, 20 bp, Artificial Sequence
  chemically synthesized
tacttgggaggctgagatgg

SEQ ID NO: 57452 - DNA, 20 bp, Artificial Sequence
  chemically synthesized
tggcgccattgcactccaac

SEQ ID NO: 57453 - DNA, 20 bp, Artificial Sequence
  chemically synthesized
caaaaaaattcatgtattta

SEQ ID NO: 57454 - DNA, 20 bp, Artificial Sequence
  chemically synthesized
tcaattggtgcaattttcag

SEQ ID NO: 57455 - DNA, 20 bp, Artificial Sequence
  chemically synthesized
agatgaataatgaaagatgg

SEQ ID NO: 57456 - DNA, 20 bp, Artificial Sequence
  chemically synthesized
taatgaaagatggcaggatc

SEQ ID NO: 57457 - DNA, 20 bp, Artificial Sequence
  chemically synthesized
aaagatggcaggatcaaggg

SEQ ID NO: 57458 - DNA, 20 bp, Artificial Sequence
  chemically synthesized
atggcaggatcaagggtggg

SEQ ID NO: 57459 - DNA, 20 bp, Artificial Sequence
  chemically synthesized
caggatcaagggtggggtgg

SEQ ID NO: 57460 - DNA, 20 bp, Artificial Sequence
  chemically synthesized
gcctgaaaaaacaggacagc

SEQ ID NO: 57461 - DNA, 20 bp, Artificial Sequence
  chemically synthesized
aaagaacagaagttaggttg

SEQ ID NO: 57462 - DNA, 20 bp, Artificial Sequence
  chemically synthesized
aagtaactctcctgattatg

SEQ ID NO: 57463 - DNA, 20 bp, Artificial Sequence
  chemically synthesized
ctttacctcatgctggtccc

SEQ ID NO: 57464 - DNA, 20 bp, Artificial Sequence
  chemically synthesized
gtcccatgaatctcataagc

SEQ ID NO: 57465 - DNA, 20 bp, Artificial Sequence
  chemically synthesized
catgacactttttgaggccc

SEQ ID NO: 57466 - DNA, 20 bp, Artificial Sequence
  chemically synthesized
ttttgaggcccctgaataca

SEQ ID NO: 57467 - DNA, 20 bp, Artificial Sequence
  chemically synthesized
aagaaaacaaccagagctag

SEQ ID NO: 57468 - DNA, 20 bp, Artificial Sequence
  chemically synthesized
cagaaaaccatttcttcttc

SEQ ID NO: 57469 - DNA, 20 bp, Artificial Sequence
  chemically synthesized
ttctccagcctctcttgcag

SEQ ID NO: 57470 - DNA, 20 bp, Artificial Sequence
  chemically synthesized
ttgcagtggggtgtggcctt

SEQ ID NO: 57471 - DNA, 20 bp, Artificial Sequence
  chemically synthesized
ctccgtcctcttccaccact

SEQ ID NO: 57472 - DNA, 20 bp, Artificial Sequence
  chemically synthesized
acatccattttgactctgat

SEQ ID NO: 57473 - DNA, 20 bp, Artificial Sequence
  chemically synthesized
aaacacatccactttgcctt

SEQ ID NO: 57474 - DNA, 20 bp, Artificial Sequence
  chemically synthesized
ttactaatgagccccaaagc

SEQ ID NO: 57475 - DNA, 20 bp, Artificial Sequence
  chemically synthesized
aaagcaggagtatttaaact

SEQ ID NO: 57476 - DNA, 20 bp, Artificial Sequence
  chemically synthesized
gtctcagctacagtgacatg

SEQ ID NO: 57477 - DNA, 20 bp, Artificial Sequence
  chemically synthesized
tggccctggctaagaccttc

SEQ ID NO: 57478 - DNA, 20 bp, Artificial Sequence
  chemically synthesized
gaccttccagaatgtcctca

SEQ ID NO: 57479 - DNA, 20 bp, Artificial Sequence
  chemically synthesized
tcagtctcactgccttaatg

SEQ ID NO: 57480 - DNA, 20 bp, Artificial Sequence
  chemically synthesized
cctactgccttcctgccttg

SEQ ID NO: 57481 - DNA, 20 bp, Artificial Sequence
  chemically synthesized
gcctgggaagttagttgtct

SEQ ID NO: 57482 - DNA, 20 bp, Artificial Sequence
  chemically synthesized
gaagttagttgtctgggggt

SEQ ID NO: 57483 - DNA, 20 bp, Artificial Sequence
  chemically synthesized
gcagttgttcacaagaagat

SEQ ID NO: 57484 - DNA, 20 bp, Artificial Sequence
  chemically synthesized
ttcatcagactttcactcag

SEQ ID NO: 57485 - DNA, 20 bp, Artificial Sequence
  chemically synthesized
tcactcagtagagtgtgagc

SEQ ID NO: 57486 - DNA, 20 bp, Artificial Sequence
  chemically synthesized
ataaaatgcagcccacatgg

SEQ ID NO: 57487 - DNA, 20 bp, Artificial Sequence
  chemically synthesized
aatgactttgtttttcaccc

SEQ ID NO: 57488 - DNA, 20 bp, Artificial Sequence
  chemically synthesized
actttgtttttcacccttgg

SEQ ID NO: 57489 - DNA, 20 bp, Artificial Sequence
  chemically synthesized
gggaagcaggaggaaaggca

SEQ ID NO: 57490 - DNA, 20 bp, Artificial Sequence
  chemically synthesized
gggtggagaacagccgaaca

SEQ ID NO: 57491 - DNA, 20 bp, Artificial Sequence
  chemically synthesized
tgcccatcttttaataatag

SEQ ID NO: 57492 - DNA, 20 bp, Artificial Sequence
  chemically synthesized
ccagcatattgataaggaaa

SEQ ID NO: 57493 - DNA, 20 bp, Artificial Sequence
  chemically synthesized
gcccctgtaaaatggtttaa

SEQ ID NO: 57494 - DNA, 20 bp, Artificial Sequence
  chemically synthesized
tcatcaagcaatacttcaga

SEQ ID NO: 57495 - DNA, 20 bp, Artificial Sequence
  chemically synthesized
ggaatagattcttgtacaat

SEQ ID NO: 57496 - DNA, 20 bp, Artificial Sequence
  chemically synthesized
tgctaagagaagtgggaagg

SEQ ID NO: 57497 - DNA, 20 bp, Artificial Sequence
  chemically synthesized
tgcttccctcttcagcctta

SEQ ID NO: 57498 - DNA, 20 bp, Artificial Sequence
  chemically synthesized
atgcttaaacaaggggaagt

SEQ ID NO: 57499 - DNA, 20 bp, Artificial Sequence
  chemically synthesized
acctctcttcctgcttgtcc

SEQ ID NO: 57500 - DNA, 20 bp, Artificial Sequence
  chemically synthesized
gtcagatttgcagtctgctg

SEQ ID NO: 57501 - DNA, 20 bp, Artificial Sequence
  chemically synthesized
ctgcaagtgcattgagcatg

SEQ ID NO: 57502 - DNA, 20 bp, Artificial Sequence
  chemically synthesized
gcattgagcatgtgggatat

SEQ ID NO: 57503 - DNA, 20 bp, Artificial Sequence
  chemically synthesized
ctggaggctcttggtgtgtt

SEQ ID NO: 57504 - DNA, 20 bp, Artificial Sequence
  chemically synthesized
taagggcttgcatgctggtg

SEQ ID NO: 57505 - DNA, 20 bp, Artificial Sequence
  chemically synthesized
atgctggtgtggagttttgt

SEQ ID NO: 57506 - DNA, 20 bp, Artificial Sequence
  chemically synthesized
ctctgctcactctcagagaa

SEQ ID NO: 57507 - DNA, 20 bp, Artificial Sequence
  chemically synthesized
cttactctttcttatctcta

SEQ ID NO: 57508 - DNA, 20 bp, Artificial Sequence
  chemically synthesized
ttacctttaattttcttttt

SEQ ID NO: 57509 - DNA, 20 bp, Artificial Sequence
  chemically synthesized
ttttgagggttgaaggggga

SEQ ID NO: 57510 - DNA, 20 bp, Artificial Sequence
  chemically synthesized
ggttgaagggggagcgaata

SEQ ID NO: 57511 - DNA, 20 bp, Artificial Sequence
  chemically synthesized
aacatttaaatcagtaaact

SEQ ID NO: 57512 - DNA, 20 bp, Artificial Sequence
  chemically synthesized
agaagaagcaagtctgtctc

SEQ ID NO: 57513 - DNA, 20 bp, Artificial Sequence
  chemically synthesized
gtacaatacagaaaatctgc

SEQ ID NO: 57514 - DNA, 20 bp, Artificial Sequence
  chemically synthesized
tgcttgagtttcttgccctg

SEQ ID NO: 57515 - DNA, 20 bp, Artificial Sequence
  chemically synthesized
gctcaatactgcactctttc

SEQ ID NO: 57516 - DNA, 20 bp, Artificial Sequence
  chemically synthesized
ctagcctactggcttgcctt

SEQ ID NO: 57517 - DNA, 20 bp, Artificial Sequence
  chemically synthesized
ataagttagctaaacttact

SEQ ID NO: 57518 - DNA, 20 bp, Artificial Sequence
  chemically synthesized
aaacttactcagaatgttgt

SEQ ID NO: 57519 - DNA, 20 bp, Artificial Sequence
  chemically synthesized
gatttggggagaagaccaca

SEQ ID NO: 57520 - DNA, 20 bp, Artificial Sequence
  chemically synthesized
ggaaggaaaggacacctgtg

SEQ ID NO: 57521 - DNA, 20 bp, Artificial Sequence
  chemically synthesized
acaaacactatctttcacac

SEQ ID NO: 57522 - DNA, 20 bp, Artificial Sequence
  chemically synthesized
cacctgggtttgaagatcct

SEQ ID NO: 57523 - DNA, 20 bp, Artificial Sequence
  chemically synthesized
tattataaaaatttacagta

SEQ ID NO: 57524 - DNA, 20 bp, Artificial Sequence
  chemically synthesized
atttgtctacttttaaccta

SEQ ID NO: 57525 - DNA, 20 bp, Artificial Sequence
  chemically synthesized
tattgctctttccaatcagt

SEQ ID NO: 57526 - DNA, 20 bp, Artificial Sequence
  chemically synthesized
ctccacgagggccccactgt

SEQ ID NO: 57527 - DNA, 20 bp, Artificial Sequence
  chemically synthesized
ccccactgtaggaataaaaa

SEQ ID NO: 57528 - DNA, 20 bp, Artificial Sequence
  chemically synthesized
ggatatgtcttgattcaggt

SEQ ID NO: 57529 - DNA, 20 bp, Artificial Sequence
  chemically synthesized
gtaggagttcctgtatgcag

SEQ ID NO: 57530 - DNA, 20 bp, Artificial Sequence
  chemically synthesized
ttaactctgttcataggtat

SEQ ID NO: 57531 - DNA, 20 bp, Artificial Sequence
  chemically synthesized
ctctgttcataggtatgtgg

SEQ ID NO: 57532 - DNA, 20 bp, Artificial Sequence
  chemically synthesized
gttcataggtatgtgggtgg

SEQ ID NO: 57533 - DNA, 20 bp, Artificial Sequence
  chemically synthesized
gggtgagtggaggcatgttc

SEQ ID NO: 57534 - DNA, 20 bp, Artificial Sequence
  chemically synthesized
atgttcaggaatgagagata

SEQ ID NO: 57535 - DNA, 20 bp, Artificial Sequence
  chemically synthesized
atacttagtgatgatttact

SEQ ID NO: 57536 - DNA, 20 bp, Artificial Sequence
  chemically synthesized
tgctttttttgatgttccat

SEQ ID NO: 57537 - DNA, 20 bp, Artificial Sequence
  chemically synthesized
gaaaatgataacatagtata

SEQ ID NO: 57538 - DNA, 20 bp, Artificial Sequence
  chemically synthesized
cataatatcacatatacttg

SEQ ID NO: 57539 - DNA, 20 bp, Artificial Sequence
  chemically synthesized
tatacttgatgggtaacgta

SEQ ID NO: 57540 - DNA, 20 bp, Artificial Sequence
  chemically synthesized
tttggctggtgaaccctaac

SEQ ID NO: 57541 - DNA, 20 bp, Artificial Sequence
  chemically synthesized
atatataaattactaatatc

SEQ ID NO: 57542 - DNA, 20 bp, Artificial Sequence
  chemically synthesized
aaatctgacccacatagaaa

SEQ ID NO: 57543 - DNA, 20 bp, Artificial Sequence
  chemically synthesized
attattttagaaactggaag

SEQ ID NO: 57544 - DNA, 20 bp, Artificial Sequence
  chemically synthesized
tcaaagcataatttaataac

SEQ ID NO: 57545 - DNA, 20 bp, Artificial Sequence
  chemically synthesized
ttagtgctgaaattgtgaac

SEQ ID NO: 57546 - DNA, 20 bp, Artificial Sequence
  chemically synthesized
ccctaagaccaggacacgac

SEQ ID NO: 57547 - DNA, 20 bp, Artificial Sequence
  chemically synthesized
atcctttgcccactttttga

SEQ ID NO: 57548 - DNA, 20 bp, Artificial Sequence
  chemically synthesized
tttttttcttgtaaatttgt

SEQ ID NO: 57549 - DNA, 20 bp, Artificial Sequence
  chemically synthesized
gtttgagttcattgtagatt

SEQ ID NO: 57550 - DNA, 20 bp, Artificial Sequence
  chemically synthesized
acataccatctcacaccagt

SEQ ID NO: 57551 - DNA, 20 bp, Artificial Sequence
  chemically synthesized
aggaaacaaaaggtgctgga

SEQ ID NO: 57552 - DNA, 20 bp, Artificial Sequence
  chemically synthesized
ccattgtggaagacagtgtg

SEQ ID NO: 57553 - DNA, 20 bp, Artificial Sequence
  chemically synthesized
agacagtgtggcgagtcctc

SEQ ID NO: 57554 - DNA, 20 bp, Artificial Sequence
  chemically synthesized
ttgacccagccatcccatta

SEQ ID NO: 57555 - DNA, 20 bp, Artificial Sequence
  chemically synthesized
attactgggtatatacccaa

SEQ ID NO: 57556 - DNA, 20 bp, Artificial Sequence
  chemically synthesized
aaatgtccatcaatgataga

SEQ ID NO: 57557 - DNA, 20 bp, Artificial Sequence
  chemically synthesized
aatgtggcacatatacacca

SEQ ID NO: 57558 - DNA, 20 bp, Artificial Sequence
  chemically synthesized
aatactatgcagccataaaa

SEQ ID NO: 57559 - DNA, 20 bp, Artificial Sequence
  chemically synthesized
ctatgcagccataaaaaagg

SEQ ID NO: 57560 - DNA, 20 bp, Artificial Sequence
  chemically synthesized
ttcatgtcctttatagggac

SEQ ID NO: 57561 - DNA, 20 bp, Artificial Sequence
  chemically synthesized
gcatgttctcactcatagat

SEQ ID NO: 57562 - DNA, 20 bp, Artificial Sequence
  chemically synthesized
cataggtggaaggagggggg

SEQ ID NO: 57563 - DNA, 20 bp, Artificial Sequence
  chemically synthesized
agatatacctaatgtaaatg

SEQ ID NO: 57564 - DNA, 20 bp, Artificial Sequence
  chemically synthesized
gaaaatatcttcccaacttt

SEQ ID NO: 57565 - DNA, 20 bp, Artificial Sequence
  chemically synthesized
gtaggcaaagttatcttagc

SEQ ID NO: 57566 - DNA, 20 bp, Artificial Sequence
  chemically synthesized
gaaaataaaatggcaaactt

SEQ ID NO: 57567 - DNA, 20 bp, Artificial Sequence
  chemically synthesized
tctgacaaaggaaatgtata

SEQ ID NO: 57568 - DNA, 20 bp, Artificial Sequence
  chemically synthesized
acatttgttatttgacaaat

SEQ ID NO: 57569 - DNA, 20 bp, Artificial Sequence
  chemically synthesized
ctctcatgcatcgctggaag

SEQ ID NO: 57570 - DNA, 20 bp, Artificial Sequence
  chemically synthesized
atgcatcgctggaaggagag

SEQ ID NO: 57571 - DNA, 20 bp, Artificial Sequence
  chemically synthesized
atacacaaactgatttgtcc

SEQ ID NO: 57572 - DNA, 20 bp, Artificial Sequence
  chemically synthesized
aaatgttcatcaagaagaga

SEQ ID NO: 57573 - DNA, 20 bp, Artificial Sequence
  chemically synthesized
tttgtggtatattcatacag

SEQ ID NO: 57574 - DNA, 20 bp, Artificial Sequence
  chemically synthesized
ttaaatgaaagaagacagaa

SEQ ID NO: 57575 - DNA, 20 bp, Artificial Sequence
  chemically synthesized
aaagaagacagaaaagaata

SEQ ID NO: 57576 - DNA, 20 bp, Artificial Sequence
  chemically synthesized
tcagaaactggcaaaaacca

SEQ ID NO: 57577 - DNA, 20 bp, Artificial Sequence
  chemically synthesized
tggcaaaaaccaaagggtaa

SEQ ID NO: 57578 - DNA, 20 bp, Artificial Sequence
  chemically synthesized
aaccaaagggtaatagaatt

SEQ ID NO: 57579 - DNA, 20 bp, Artificial Sequence
  chemically synthesized
ttgagaattatgattgctcc

SEQ ID NO: 57580 - DNA, 20 bp, Artificial Sequence
  chemically synthesized
aagttctatatctttaccat

SEQ ID NO: 57581 - DNA, 20 bp, Artificial Sequence
  chemically synthesized
atatattctcattgtaaagg

SEQ ID NO: 57582 - DNA, 20 bp, Artificial Sequence
  chemically synthesized
gtagaataaaagtaatatca

SEQ ID NO: 57583 - DNA, 20 bp, Artificial Sequence
  chemically synthesized
atagctctaaagaggtataa

SEQ ID NO: 57584 - DNA, 20 bp, Artificial Sequence
  chemically synthesized
tgggcagaagaaaagttcct

SEQ ID NO: 57585 - DNA, 20 bp, Artificial Sequence
  chemically synthesized
gggtaagtttgcgtatatga

SEQ ID NO: 57586 - DNA, 20 bp, Artificial Sequence
  chemically synthesized
gtaattttgtttaaatccta

SEQ ID NO: 57587 - DNA, 20 bp, Artificial Sequence
  chemically synthesized
tgttggcttcccttggtgaa

SEQ ID NO: 57588 - DNA, 20 bp, Artificial Sequence
  chemically synthesized
tcttctctgcatgtgctcaa

SEQ ID NO: 57589 - DNA, 20 bp, Artificial Sequence
  chemically synthesized
gtgctcaaatgagtcctttc

SEQ ID NO: 57590 - DNA, 20 bp, Artificial Sequence
  chemically synthesized
aggaacctgtttgtctggct

SEQ ID NO: 57591 - DNA, 20 bp, Artificial Sequence
  chemically synthesized
ccaggaggttaaatgcaggg

SEQ ID NO: 57592 - DNA, 20 bp, Artificial Sequence
  chemically synthesized
gagtgccctagcttttgtta

SEQ ID NO: 57593 - DNA, 20 bp, Artificial Sequence
  chemically synthesized
cctttggtttattgtggtct

SEQ ID NO: 57594 - DNA, 20 bp, Artificial Sequence
  chemically synthesized
ttttgttaactgctatcttt

SEQ ID NO: 57595 - DNA, 20 bp, Artificial Sequence
  chemically synthesized
gtgcgattgtttaggcttta

SEQ ID NO: 57596 - DNA, 20 bp, Artificial Sequence
  chemically synthesized
tgtgtgtctcaaagttacta

SEQ ID NO: 57597 - DNA, 20 bp, Artificial Sequence
  chemically synthesized
tagggagttgtgttccttgt

SEQ ID NO: 57598 - DNA, 20 bp, Artificial Sequence
  chemically synthesized
taggctttcccaacttggaa

SEQ ID NO: 57599 - DNA, 20 bp, Artificial Sequence
  chemically synthesized
gaacaggataaaaataaaaa

SEQ ID NO: 57600 - DNA, 20 bp, Artificial Sequence
  chemically synthesized
taaaaataaaaaccgaattt

SEQ ID NO: 57601 - DNA, 20 bp, Artificial Sequence
  chemically synthesized
ggtaagctagacagatacca

SEQ ID NO: 57602 - DNA, 20 bp, Artificial Sequence
  chemically synthesized
atagaaggggagactgggag

SEQ ID NO: 57603 - DNA, 20 bp, Artificial Sequence
  chemically synthesized
ctgggagcggggtcccattt

SEQ ID NO: 57604 - DNA, 20 bp, Artificial Sequence
  chemically synthesized
ttctgaattttaggtaaaca

SEQ ID NO: 57605 - DNA, 20 bp, Artificial Sequence
  chemically synthesized
aataacttttagttcaattc

SEQ ID NO: 57606 - DNA, 20 bp, Artificial Sequence
  chemically synthesized
tttagttcaattcttgagta

SEQ ID NO: 57607 - DNA, 20 bp, Artificial Sequence
  chemically synthesized
agcaagtttctggtactgtt

SEQ ID NO: 57608 - DNA, 20 bp, Artificial Sequence
  chemically synthesized
ggtactgttgggaatttaag

SEQ ID NO: 57609 - DNA, 20 bp, Artificial Sequence
  chemically synthesized
cagctcattcccatgatttt

SEQ ID NO: 57610 - DNA, 20 bp, Artificial Sequence
  chemically synthesized
ttaatgagcaatggacaatc

SEQ ID NO: 57611 - DNA, 20 bp, Artificial Sequence
  chemically synthesized
ttttaagggctctgaactcc

SEQ ID NO: 57612 - DNA, 20 bp, Artificial Sequence
  chemically synthesized
tccctttccaactgaaatat

SEQ ID NO: 57613 - DNA, 20 bp, Artificial Sequence
  chemically synthesized
aaaagtcaagagatatgtta

SEQ ID NO: 57614 - DNA, 20 bp, Artificial Sequence
  chemically synthesized
atgttaaagggtaagtatgt

SEQ ID NO: 57615 - DNA, 20 bp, Artificial Sequence
  chemically synthesized
aggaagtggtcaaatatggt

SEQ ID NO: 57616 - DNA, 20 bp, Artificial Sequence
  chemically synthesized
tcagcttggccaagagaaac

SEQ ID NO: 57617 - DNA, 20 bp, Artificial Sequence
  chemically synthesized
aaagtcaaacctccgtgtgg

SEQ ID NO: 57618 - DNA, 20 bp, Artificial Sequence
  chemically synthesized
agagtgatttgcccatgaaa

SEQ ID NO: 57619 - DNA, 20 bp, Artificial Sequence
  chemically synthesized
catgaaaatgagtgccttgt

SEQ ID NO: 57620 - DNA, 20 bp, Artificial Sequence
  chemically synthesized
aaaatgagtgccttgtttga

SEQ ID NO: 57621 - DNA, 20 bp, Artificial Sequence
  chemically synthesized
tcccataaattgacaaaaac

SEQ ID NO: 57622 - DNA, 20 bp, Artificial Sequence
  chemically synthesized
tgtttggactatagactgtg

SEQ ID NO: 57623 - DNA, 20 bp, Artificial Sequence
  chemically synthesized
gagaattgtctcagtgtcta

SEQ ID NO: 57624 - DNA, 20 bp, Artificial Sequence
  chemically synthesized
gaagccttctattactactg

SEQ ID NO: 57625 - DNA, 20 bp, Artificial Sequence
  chemically synthesized
ctaactaaaaagtaggtcat

SEQ ID NO: 57626 - DNA, 20 bp, Artificial Sequence
  chemically synthesized
aaaaagtaggtcattcggat

SEQ ID NO: 57627 - DNA, 20 bp, Artificial Sequence
  chemically synthesized
atttggagatagcctcaggt

SEQ ID NO: 57628 - DNA, 20 bp, Artificial Sequence
  chemically synthesized
ctcaggtcagaatttcaagc

SEQ ID NO: 57629 - DNA, 20 bp, Artificial Sequence
  chemically synthesized
ttggcaacaagagatgactt

SEQ ID NO: 57630 - DNA, 20 bp, Artificial Sequence
  chemically synthesized
caaaatgccaacttattcct

SEQ ID NO: 57631 - DNA, 20 bp, Artificial Sequence
  chemically synthesized
ttttggaaaatttacattga

SEQ ID NO: 57632 - DNA, 20 bp, Artificial Sequence
  chemically synthesized
agaagttaggtcaatattca

SEQ ID NO: 57633 - DNA, 20 bp, Artificial Sequence
  chemically synthesized
ttattcactggccgactatt

SEQ ID NO: 57634 - DNA, 20 bp, Artificial Sequence
  chemically synthesized
aaactagtaagcactggtat

SEQ ID NO: 57635 - DNA, 20 bp, Artificial Sequence
  chemically synthesized
tcagatgcaacttgaagaca

SEQ ID NO: 57636 - DNA, 20 bp, Artificial Sequence
  chemically synthesized
gagaagtgttgtaggagacg

SEQ ID NO: 57637 - DNA, 20 bp, Artificial Sequence
  chemically synthesized
aattctgatatgaagttggg

SEQ ID NO: 57638 - DNA, 20 bp, Artificial Sequence
  chemically synthesized
atatgaagttgggagggatg

SEQ ID NO: 57639 - DNA, 20 bp, Artificial Sequence
  chemically synthesized
agatccagagcatcatttga

SEQ ID NO: 57640 - DNA, 20 bp, Artificial Sequence
  chemically synthesized
agcatcatttgactgagtct

SEQ ID NO: 57641 - DNA, 20 bp, Artificial Sequence
  chemically synthesized
aaccgtgagaggagatttgt

SEQ ID NO: 57642 - DNA, 20 bp, Artificial Sequence
  chemically synthesized
agtgtttttggtgaaggaca

SEQ ID NO: 57643 - DNA, 20 bp, Artificial Sequence
  chemically synthesized
aggagtttcaggaggccttt

SEQ ID NO: 57644 - DNA, 20 bp, Artificial Sequence
  chemically synthesized
agcatatgaaaagagagaca

SEQ ID NO: 57645 - DNA, 20 bp, Artificial Sequence
  chemically synthesized
cagattggtgatgttgacat

SEQ ID NO: 57646 - DNA, 20 bp, Artificial Sequence
  chemically synthesized
gtcctcaaaagcacaggtca

SEQ ID NO: 57647 - DNA, 20 bp, Artificial Sequence
  chemically synthesized
cttccaactggctatagcat

SEQ ID NO: 57648 - DNA, 20 bp, Artificial Sequence
  chemically synthesized
caactggctatagcatgaga

SEQ ID NO: 57649 - DNA, 20 bp, Artificial Sequence
  chemically synthesized
gtggcagacatgaaatagta

SEQ ID NO: 57650 - DNA, 20 bp, Artificial Sequence
  chemically synthesized
acaaaaacgctcaatgctaa

SEQ ID NO: 57651 - DNA, 20 bp, Artificial Sequence
  chemically synthesized
gaaaaaaaaaatccatcata

SEQ ID NO: 57652 - DNA, 20 bp, Artificial Sequence
  chemically synthesized
taagtaacctccaaatattt

SEQ ID NO: 57653 - DNA, 20 bp, Artificial Sequence
  chemically synthesized
attcttttctgtatttaaac

SEQ ID NO: 57654 - DNA, 20 bp, Artificial Sequence
  chemically synthesized
aatgatagctatcttgcagt

SEQ ID NO: 57655 - DNA, 20 bp, Artificial Sequence
  chemically synthesized
ccgatttggtgaaacttcct

SEQ ID NO: 57656 - DNA, 20 bp, Artificial Sequence
  chemically synthesized
cagtatctgatagattctag

SEQ ID NO: 57657 - DNA, 20 bp, Artificial Sequence
  chemically synthesized
tacatgatagaaagtgaggc

SEQ ID NO: 57658 - DNA, 20 bp, Artificial Sequence
  chemically synthesized
cactgggacctgagaaaatc

SEQ ID NO: 57659 - DNA, 20 bp, Artificial Sequence
  chemically synthesized
ggagtaagcaaagccattct

SEQ ID NO: 57660 - DNA, 20 bp, Artificial Sequence
  chemically synthesized
ccaaggctttacactggaga

SEQ ID NO: 57661 - DNA, 20 bp, Artificial Sequence
  chemically synthesized
tcccagagaccaagggctgt

SEQ ID NO: 57662 - DNA, 20 bp, Artificial Sequence
  chemically synthesized
gaaagttaataaagctgact

SEQ ID NO: 57663 - DNA, 20 bp, Artificial Sequence
  chemically synthesized
actgtgaatggaccaaccag

SEQ ID NO: 57664 - DNA, 20 bp, Artificial Sequence
  chemically synthesized
caaacagccctagctagacc

SEQ ID NO: 57665 - DNA, 20 bp, Artificial Sequence
  chemically synthesized
tttgtttttctggccattcc

SEQ ID NO: 57666 - DNA, 20 bp, Artificial Sequence
  chemically synthesized
agctctttatgtagtttcag

SEQ ID NO: 57667 - DNA, 20 bp, Artificial Sequence
  chemically synthesized
cacagaacatgtattattat

SEQ ID NO: 57668 - DNA, 20 bp, Artificial Sequence
  chemically synthesized
tatttggattcagacatcct

SEQ ID NO: 57669 - DNA, 20 bp, Artificial Sequence
  chemically synthesized
tttcagtagatattatgggg

SEQ ID NO: 57670 - DNA, 20 bp, Artificial Sequence
  chemically synthesized
atgtgatggcattttacaaa

SEQ ID NO: 57671 - DNA, 20 bp, Artificial Sequence
  chemically synthesized
gagctgaaaaattcttggct

SEQ ID NO: 57672 - DNA, 20 bp, Artificial Sequence
  chemically synthesized
gacagatgtgcgtttaaatt

SEQ ID NO: 57673 - DNA, 20 bp, Artificial Sequence
  chemically synthesized
actcgtgctatgagcaatca

SEQ ID NO: 57674 - DNA, 20 bp, Artificial Sequence
  chemically synthesized
gtgctatgagcaatcactga

SEQ ID NO: 57675 - DNA, 20 bp, Artificial Sequence
  chemically synthesized
gaggtagcttagaacacagt

SEQ ID NO: 57676 - DNA, 20 bp, Artificial Sequence
  chemically synthesized
gaacacagtaaggatttaat

SEQ ID NO: 57677 - DNA, 20 bp, Artificial Sequence
  chemically synthesized
ggatttaatagggattagct

SEQ ID NO: 57678 - DNA, 20 bp, Artificial Sequence
  chemically synthesized
aagtaatgaaaaggtaaaat

SEQ ID NO: 57679 - DNA, 20 bp, Artificial Sequence
  chemically synthesized
tttgaaattacatagagctt

SEQ ID NO: 57680 - DNA, 20 bp, Artificial Sequence
  chemically synthesized
ttacatagagcttttgaata

SEQ ID NO: 57681 - DNA, 20 bp, Artificial Sequence
  chemically synthesized
ccataaaaatttaaattgtg

SEQ ID NO: 57682 - DNA, 20 bp, Artificial Sequence
  chemically synthesized
atctagaagtcttcttccta

SEQ ID NO: 57683 - DNA, 20 bp, Artificial Sequence
  chemically synthesized
gaagtcttcttcctactgaa

SEQ ID NO: 57684 - DNA, 20 bp, Artificial Sequence
  chemically synthesized
tgattaatagtgtaaatgat

SEQ ID NO: 57685 - DNA, 20 bp, Artificial Sequence
  chemically synthesized
caactttcaacaagcagcaa

SEQ ID NO: 57686 - DNA, 20 bp, Artificial Sequence
  chemically synthesized
tcaacaagcagcaactgaat

SEQ ID NO: 57687 - DNA, 20 bp, Artificial Sequence
  chemically synthesized
aagtattttgacgtaatcat

SEQ ID NO: 57688 - DNA, 20 bp, Artificial Sequence
  chemically synthesized
ttttgacgtaatcatgtgaa

SEQ ID NO: 57689 - DNA, 20 bp, Artificial Sequence
  chemically synthesized
aaatctgaaacttaaaaagt

SEQ ID NO: 57690 - DNA, 20 bp, Artificial Sequence
  chemically synthesized
tttaaaaatagtatgatcac

SEQ ID NO: 57691 - DNA, 20 bp, Artificial Sequence
  chemically synthesized
atgatcaccagggtgaacta

SEQ ID NO: 57692 - DNA, 20 bp, Artificial Sequence
  chemically synthesized
tgagtatagatgacatgaaa

SEQ ID NO: 57693 - DNA, 20 bp, Artificial Sequence
  chemically synthesized
atccaaggcaaagtttagca

SEQ ID NO: 57694 - DNA, 20 bp, Artificial Sequence
  chemically synthesized
taataatcatcccccataaa

SEQ ID NO: 57695 - DNA, 20 bp, Artificial Sequence
  chemically synthesized
tcccttaatgagaaaattct

SEQ ID NO: 57696 - DNA, 20 bp, Artificial Sequence
  chemically synthesized
catgactcaaaatgcataag

SEQ ID NO: 57697 - DNA, 20 bp, Artificial Sequence
  chemically synthesized
acaatgtgtttatgtatggg

SEQ ID NO: 57698 - DNA, 20 bp, Artificial Sequence
  chemically synthesized
taagttttttagatcccaaa

SEQ ID NO: 57699 - DNA, 20 bp, Artificial Sequence
  chemically synthesized
aggcaattcagtgtatttca

SEQ ID NO: 57700 - DNA, 20 bp, Artificial Sequence
  chemically synthesized
gaaaacactttcaaaagtta

SEQ ID NO: 57701 - DNA, 20 bp, Artificial Sequence
  chemically synthesized
tagccactgatttaggtgct

SEQ ID NO: 57702 - DNA, 20 bp, Artificial Sequence
  chemically synthesized
tatcctgaaagttatgcttt

SEQ ID NO: 57703 - DNA, 20 bp, Artificial Sequence
  chemically synthesized
ttcttaaaaagtcaaacaaa

SEQ ID NO: 57704 - DNA, 20 bp, Artificial Sequence
  chemically synthesized
gagcattctttttgtaagag

SEQ ID NO: 57705 - DNA, 20 bp, Artificial Sequence
  chemically synthesized
aacatttaagatctacactt

SEQ ID NO: 57706 - DNA, 20 bp, Artificial Sequence
  chemically synthesized
agtgaaatgcattccttctt

SEQ ID NO: 57707 - DNA, 20 bp, Artificial Sequence
  chemically synthesized
ttaaacattaaaaaaaatga

SEQ ID NO: 57708 - DNA, 20 bp, Artificial Sequence
  chemically synthesized
gactcaggtctgttagggaa

SEQ ID NO: 57709 - DNA, 20 bp, Artificial Sequence
  chemically synthesized
accatgccaaaagttgtacc

SEQ ID NO: 57710 - DNA, 20 bp, Artificial Sequence
  chemically synthesized
ttctgagagagatagagaga

SEQ ID NO: 57711 - DNA, 20 bp, Artificial Sequence
  chemically synthesized
tgtgagccagtgtgtatgaa

SEQ ID NO: 57712 - DNA, 20 bp, Artificial Sequence
  chemically synthesized
ccagtgtgtatgaaatgaat

SEQ ID NO: 57713 - DNA, 20 bp, Artificial Sequence
  chemically synthesized
actctctctctctatctctc

SEQ ID NO: 57714 - DNA, 20 bp, Artificial Sequence
  chemically synthesized
ctttacttcaagtcgtttct

SEQ ID NO: 57715 - DNA, 20 bp, Artificial Sequence
  chemically synthesized
cactgggtttgaatgcagtt

SEQ ID NO: 57716 - DNA, 20 bp, Artificial Sequence
  chemically synthesized
tgattactctgctcttacaa

SEQ ID NO: 57717 - DNA, 20 bp, Artificial Sequence
  chemically synthesized
attcattttgtttgactttt

SEQ ID NO: 57718 - DNA, 20 bp, Artificial Sequence
  chemically synthesized
ctcagcacctaaatcagtgg

SEQ ID NO: 57719 - DNA, 20 bp, Artificial Sequence
  chemically synthesized
ttttaagtaaataactgact

SEQ ID NO: 57720 - DNA, 20 bp, Artificial Sequence
  chemically synthesized
attacgaaggatggaaatcc

SEQ ID NO: 57721 - DNA, 20 bp, Artificial Sequence
  chemically synthesized
catactatttttaaaatata

SEQ ID NO: 57722 - DNA, 20 bp, Artificial Sequence
  chemically synthesized
catcacaaggatgatcaaga

SEQ ID NO: 57723 - DNA, 20 bp, Artificial Sequence
  chemically synthesized
atattaattattgagcattt

SEQ ID NO: 57724 - DNA, 20 bp, Artificial Sequence
  chemically synthesized
caaatgtttcatgtatattt

SEQ ID NO: 57725 - DNA, 20 bp, Artificial Sequence
  chemically synthesized
tttcatgtatattttcagaa

SEQ ID NO: 57726 - DNA, 20 bp, Artificial Sequence
  chemically synthesized
accttttcattacttatttc

SEQ ID NO: 57727 - DNA, 20 bp, Artificial Sequence
  chemically synthesized
gaggaccacaggtagagtat

SEQ ID NO: 57728 - DNA, 20 bp, Artificial Sequence
  chemically synthesized
gtacattaactactcttagc

SEQ ID NO: 57729 - DNA, 20 bp, Artificial Sequence
  chemically synthesized
aatttttcagctcacgtcat

SEQ ID NO: 57730 - DNA, 20 bp, Artificial Sequence
  chemically synthesized
tagagtgtgctgtctctatt

SEQ ID NO: 57731 - DNA, 20 bp, Artificial Sequence
  chemically synthesized
taataatacatgttctgtgt

SEQ ID NO: 57732 - DNA, 20 bp, Artificial Sequence
  chemically synthesized
ctgtgtatagaattggtgga

SEQ ID NO: 57733 - DNA, 20 bp, Artificial Sequence
  chemically synthesized
taaggtcagaaccactgcat

SEQ ID NO: 57734 - DNA, 20 bp, Artificial Sequence
  chemically synthesized
gaaagctaccactgcacagg

SEQ ID NO: 57735 - DNA, 20 bp, Artificial Sequence
  chemically synthesized
tggatggattctgggaatgg

SEQ ID NO: 57736 - DNA, 20 bp, Artificial Sequence
  chemically synthesized
ccctactgagttatttaagt

SEQ ID NO: 57737 - DNA, 20 bp, Artificial Sequence
  chemically synthesized
aggctcacacttgagcactc

SEQ ID NO: 57738 - DNA, 20 bp, Artificial Sequence
  chemically synthesized
atagggtctacaaaacagct

SEQ ID NO: 57739 - DNA, 20 bp, Artificial Sequence
  chemically synthesized
cactttcttccagcatcctg

SEQ ID NO: 57740 - DNA, 20 bp, Artificial Sequence
  chemically synthesized
tatcagatactgcgtctata

SEQ ID NO: 57741 - DNA, 20 bp, Artificial Sequence
  chemically synthesized
caatcaatgtaacaaatgta

SEQ ID NO: 57742 - DNA, 20 bp, Artificial Sequence
  chemically synthesized
gaaaaaactccagtttaaat

SEQ ID NO: 57743 - DNA, 20 bp, Artificial Sequence
  chemically synthesized
aactccagtttaaatacaga

SEQ ID NO: 57744 - DNA, 20 bp, Artificial Sequence
  chemically synthesized
aatgcctctggttctttaac

SEQ ID NO: 57745 - DNA, 20 bp, Artificial Sequence
  chemically synthesized
tgctctttttaatagccaca

SEQ ID NO: 57746 - DNA, 20 bp, Artificial Sequence
  chemically synthesized
ctttttaatagccacaaaag

SEQ ID NO: 57747 - DNA, 20 bp, Artificial Sequence
  chemically synthesized
acatccctcccaacttcata

SEQ ID NO: 57748 - DNA, 20 bp, Artificial Sequence
  chemically synthesized
gcttactagttttttgacct

SEQ ID NO: 57749 - DNA, 20 bp, Artificial Sequence
  chemically synthesized
attttgtttcacaaggtctc

SEQ ID NO: 57750 - DNA, 20 bp, Artificial Sequence
  chemically synthesized
ggttactatctctggtgatt

SEQ ID NO: 57751 - DNA, 20 bp, Artificial Sequence
  chemically synthesized
cagttggaaagggactgcct

SEQ ID NO: 57752 - DNA, 20 bp, Artificial Sequence
  chemically synthesized
tggaaagggactgccttaag

SEQ ID NO: 57753 - DNA, 20 bp, Artificial Sequence
  chemically synthesized
tcaaaatcatgggaatgagc

SEQ ID NO: 57754 - DNA, 20 bp, Artificial Sequence
  chemically synthesized
tccttaaattcccaacagta

SEQ ID NO: 57755 - DNA, 20 bp, Artificial Sequence
  chemically synthesized
ttacaaatatattctatact

SEQ ID NO: 57756 - DNA, 20 bp, Artificial Sequence
  chemically synthesized
atcccatgtttacctaaaat

SEQ ID NO: 57757 - DNA, 20 bp, Artificial Sequence
  chemically synthesized
aaaattacatcggttaatgg

SEQ ID NO: 57758 - DNA, 20 bp, Artificial Sequence
  chemically synthesized
cttttattctacctttacaa

SEQ ID NO: 57759 - DNA, 20 bp, Artificial Sequence
  chemically synthesized
cacaaaaattaagtgaattt

SEQ ID NO: 57760 - DNA, 20 bp, Artificial Sequence
  chemically synthesized
gtttctgatagttcttatta

SEQ ID NO: 57761 - DNA, 20 bp, Artificial Sequence
  chemically synthesized
tttttctggggtataaaacc

SEQ ID NO: 57762 - DNA, 20 bp, Artificial Sequence
  chemically synthesized
taagcatgtatctaagttta

SEQ ID NO: 57763 - DNA, 20 bp, Artificial Sequence
  chemically synthesized
ttgtccttgtgatagtttgc

SEQ ID NO: 57764 - DNA, 20 bp, Artificial Sequence
  chemically synthesized
tggccattgatggctaatat

SEQ ID NO: 57765 - DNA, 20 bp, Artificial Sequence
  chemically synthesized
aatgaactcaaacaaattta

SEQ ID NO: 57766 - DNA, 20 bp, Artificial Sequence
  chemically synthesized
gctcatcatcaatggccatc

SEQ ID NO: 57767 - DNA, 20 bp, Artificial Sequence
  chemically synthesized
aacctcctgtacaccactga

SEQ ID NO: 57768 - DNA, 20 bp, Artificial Sequence
  chemically synthesized
tttctttccttatacatttg

SEQ ID NO: 57769 - DNA, 20 bp, Artificial Sequence
  chemically synthesized
tatacatttgatagaattta

SEQ ID NO: 57770 - DNA, 20 bp, Artificial Sequence
  chemically synthesized
taataagtttaatttctttg

SEQ ID NO: 57771 - DNA, 20 bp, Artificial Sequence
  chemically synthesized
cagtgatcaattataaaaat

SEQ ID NO: 57772 - DNA, 20 bp, Artificial Sequence
  chemically synthesized
catcactaagtatcatagca

SEQ ID NO: 57773 - DNA, 20 bp, Artificial Sequence
  chemically synthesized
gagatatatttcatcgagac

SEQ ID NO: 57774 - DNA, 20 bp, Artificial Sequence
  chemically synthesized
gcaatatatgtgtgaaggtt

SEQ ID NO: 57775 - DNA, 20 bp, Artificial Sequence
  chemically synthesized
atttatactttcctgcagtg

SEQ ID NO: 57776 - DNA, 20 bp, Artificial Sequence
  chemically synthesized
ttgataggagagatttctat

SEQ ID NO: 57777 - DNA, 20 bp, Artificial Sequence
  chemically synthesized
ccataaggcaagccagtagg

SEQ ID NO: 57778 - DNA, 20 bp, Artificial Sequence
  chemically synthesized
tgagcctaaattccgcaggg

SEQ ID NO: 57779 - DNA, 20 bp, Artificial Sequence
  chemically synthesized
gctcccccttcaaccctcaa

SEQ ID NO: 57780 - DNA, 20 bp, Artificial Sequence
  chemically synthesized
agagcaatactcattagaga

SEQ ID NO: 57781 - DNA, 20 bp, Artificial Sequence
  chemically synthesized
tcattagagataagaaagag

SEQ ID NO: 57782 - DNA, 20 bp, Artificial Sequence
  chemically synthesized
cttgtgaaaaggcaaatgta

SEQ ID NO: 57783 - DNA, 20 bp, Artificial Sequence
  chemically synthesized
atatgattattcagattgta

SEQ ID NO: 57784 - DNA, 20 bp, Artificial Sequence
  chemically synthesized
cccctttttctaatttgctc

SEQ ID NO: 57785 - DNA, 20 bp, Artificial Sequence
  chemically synthesized
gttgtgatatgtaacaaggt

SEQ ID NO: 57786 - DNA, 20 bp, Artificial Sequence
  chemically synthesized
taaatgaagaagagtgagcc

SEQ ID NO: 57787 - DNA, 20 bp, Artificial Sequence
  chemically synthesized
ttcagctcagaaggccttgt

SEQ ID NO: 57788 - DNA, 20 bp, Artificial Sequence
  chemically synthesized
agtacctctaaggcaaagca

SEQ ID NO: 57789 - DNA, 20 bp, Artificial Sequence
  chemically synthesized
catataacctaattttatta

SEQ ID NO: 57790 - DNA, 20 bp, Artificial Sequence
  chemically synthesized
accccactgcaagagaggct

SEQ ID NO: 57791 - DNA, 20 bp, Artificial Sequence
  chemically synthesized
actggatttaaacccaagaa

SEQ ID NO: 57792 - DNA, 20 bp, Artificial Sequence
  chemically synthesized
tttccttggctgccctttag

SEQ ID NO: 57793 - DNA, 20 bp, Artificial Sequence
  chemically synthesized
tcaaaatctaccttctactg

SEQ ID NO: 57794 - DNA, 20 bp, Artificial Sequence
  chemically synthesized
ttctgctctaattttggtct

SEQ ID NO: 57795 - DNA, 20 bp, Artificial Sequence
  chemically synthesized
tcatgggaccagcatgaggt

SEQ ID NO: 57796 - DNA, 20 bp, Artificial Sequence
  chemically synthesized
caattgaaaagcaacttagt

SEQ ID NO: 57797 - DNA, 20 bp, Artificial Sequence
  chemically synthesized
caggacaattagttaactaa

SEQ ID NO: 57798 - DNA, 20 bp, Artificial Sequence
  chemically synthesized
aaagtgaaactctaaacaaa

SEQ ID NO: 57799 - DNA, 20 bp, Artificial Sequence
  chemically synthesized
ttctaagcatcaaagctgta

SEQ ID NO: 57800 - DNA, 20 bp, Artificial Sequence
  chemically synthesized
agcatcaaagctgtagaaga

SEQ ID NO: 57801 - DNA, 20 bp, Artificial Sequence
  chemically synthesized
ttaaaaaaacaaatatcaca

SEQ ID NO: 57802 - DNA, 20 bp, Artificial Sequence
  chemically synthesized
gtaaaatggcgtctttctgg

SEQ ID NO: 57803 - DNA, 20 bp, Artificial Sequence
  chemically synthesized
cttaatatgtgaaaggatag

SEQ ID NO: 57804 - DNA, 20 bp, Artificial Sequence
  chemically synthesized
aacaaatacgagacaacttc

SEQ ID NO: 57805 - DNA, 20 bp, Artificial Sequence
  chemically synthesized
caacacctcttttcccatcc

SEQ ID NO: 57806 - DNA, 20 bp, Artificial Sequence
  chemically synthesized
cacaaagctgacactcctgc

SEQ ID NO: 57807 - DNA, 20 bp, Artificial Sequence
  chemically synthesized
ggcactcttacactttcttt

SEQ ID NO: 57808 - DNA, 20 bp, Artificial Sequence
  chemically synthesized
ggagtggggtccttattagc

SEQ ID NO: 57809 - DNA, 20 bp, Artificial Sequence
  chemically synthesized
gatgtctttgggactggaac

SEQ ID NO: 57810 - DNA, 20 bp, Artificial Sequence
  chemically synthesized
gctctggcttcttttccttg

SEQ ID NO: 57811 - DNA, 20 bp, Artificial Sequence
  chemically synthesized
gcttaagccccatttattga

SEQ ID NO: 57812 - DNA, 20 bp, Artificial Sequence
  chemically synthesized
ggcaaacgctgtccccaaag

SEQ ID NO: 57813 - DNA, 20 bp, Artificial Sequence
  chemically synthesized
ttaaattacttactattcta

SEQ ID NO: 57814 - DNA, 20 bp, Artificial Sequence
  chemically synthesized
agagttgctgtcagtaaaga

SEQ ID NO: 57815 - DNA, 20 bp, Artificial Sequence
  chemically synthesized
attattgtcatgtcttgttc

SEQ ID NO: 57816 - DNA, 20 bp, Artificial Sequence
  chemically synthesized
ttgatagggccccgaggccc

SEQ ID NO: 57817 - DNA, 20 bp, Artificial Sequence
  chemically synthesized
taattgtgttagagccaaga

SEQ ID NO: 57818 - DNA, 20 bp, Artificial Sequence
  chemically synthesized
ctgttcttctgattccaagc

SEQ ID NO: 57819 - DNA, 20 bp, Artificial Sequence
  chemically synthesized
aagactctggaacatctttg

SEQ ID NO: 57820 - DNA, 20 bp, Artificial Sequence
  chemically synthesized
ggaacatctttgtaagaaac

SEQ ID NO: 57821 - DNA, 20 bp, Artificial Sequence
  chemically synthesized
gttggcaacatcccagtggc

SEQ ID NO: 57822 - DNA, 20 bp, Artificial Sequence
  chemically synthesized
caattctgtgacattccctg

SEQ ID NO: 57823 - DNA, 20 bp, Artificial Sequence
  chemically synthesized
accctttctcctttttctgt

SEQ ID NO: 57824 - DNA, 20 bp, Artificial Sequence
  chemically synthesized
atacgtttcctcagcaacta

SEQ ID NO: 57825 - DNA, 20 bp, Artificial Sequence
  chemically synthesized
ctgaggatgtagtcatcact

SEQ ID NO: 57826 - DNA, 20 bp, Artificial Sequence
  chemically synthesized
ctagactgcagggagagtgg

SEQ ID NO: 57827 - DNA, 20 bp, Artificial Sequence
  chemically synthesized
ctaccaaaaccagtgaagtg

SEQ ID NO: 57828 - DNA, 20 bp, Artificial Sequence
  chemically synthesized
ctatttaaaaaaaaaagagg

SEQ ID NO: 57829 - DNA, 20 bp, Artificial Sequence
  chemically synthesized
caggaagagagcatgagagg

SEQ ID NO: 57830 - DNA, 20 bp, Artificial Sequence
  chemically synthesized
aagagagcatgagaggaaag

SEQ ID NO: 57831 - DNA, 20 bp, Artificial Sequence
  chemically synthesized
cacttaaattaaaatggcta

SEQ ID NO: 57832 - DNA, 20 bp, Artificial Sequence
  chemically synthesized
taaattaaaatggctatgag

SEQ ID NO: 57833 - DNA, 20 bp, Artificial Sequence
  chemically synthesized
gctatgagaaagaaagaggg

SEQ ID NO: 57834 - DNA, 20 bp, Artificial Sequence
  chemically synthesized
tcaaaagaaggtaaagaagt

SEQ ID NO: 57835 - DNA, 20 bp, Artificial Sequence
  chemically synthesized
taggctcaagagggaataaa

SEQ ID NO: 57836 - DNA, 20 bp, Artificial Sequence
  chemically synthesized
gaggctgccacaaacttcag

SEQ ID NO: 57837 - DNA, 20 bp, Artificial Sequence
  chemically synthesized
ccacaaagggcagatgctgc

SEQ ID NO: 57838 - DNA, 20 bp, Artificial Sequence
  chemically synthesized
taaatttacatggaggaaaa

SEQ ID NO: 57839 - DNA, 20 bp, Artificial Sequence
  chemically synthesized
gcaggtgttctttacctttt

SEQ ID NO: 57840 - DNA, 20 bp, Artificial Sequence
  chemically synthesized
gtataaatagacaatctctt

SEQ ID NO: 57841 - DNA, 20 bp, Artificial Sequence
  chemically synthesized
gaagaaatgaagagatgacc

SEQ ID NO: 57842 - DNA, 20 bp, Artificial Sequence
  chemically synthesized
ggtttccatgggaatttgct

SEQ ID NO: 57843 - DNA, 20 bp, Artificial Sequence
  chemically synthesized
agagacttggtacgggccag

SEQ ID NO: 57844 - DNA, 20 bp, Artificial Sequence
  chemically synthesized
tagtgaacaatggatatttt

SEQ ID NO: 57845 - DNA, 20 bp, Artificial Sequence
  chemically synthesized
cttagcccctctagaagagc

SEQ ID NO: 57846 - DNA, 20 bp, Artificial Sequence
  chemically synthesized
attgtccctaggtatataat

SEQ ID NO: 57847 - DNA, 20 bp, Artificial Sequence
  chemically synthesized
tcccagttttcccataagtc

SEQ ID NO: 57848 - DNA, 20 bp, Artificial Sequence
  chemically synthesized
taggttttgcaatttatgag

SEQ ID NO: 57849 - DNA, 20 bp, Artificial Sequence
  chemically synthesized
ggaaagtaaaacattcacct

SEQ ID NO: 57850 - DNA, 20 bp, Artificial Sequence
  chemically synthesized
acaacacaaaacaaaacaaa

SEQ ID NO: 57851 - DNA, 20 bp, Artificial Sequence
  chemically synthesized
caaacaagaaaactaaaata

SEQ ID NO: 57852 - DNA, 20 bp, Artificial Sequence
  chemically synthesized
taaagtaaaaacagaacaaa

SEQ ID NO: 57853 - DNA, 20 bp, Artificial Sequence
  chemically synthesized
aacaaagaagaaaattcaaa

SEQ ID NO: 57854 - DNA, 20 bp, Artificial Sequence
  chemically synthesized
cattagaagtcagtctagac

SEQ ID NO: 57855 - DNA, 20 bp, Artificial Sequence
  chemically synthesized
gcagttgggtggtagcagca

SEQ ID NO: 57856 - DNA, 20 bp, Artificial Sequence
  chemically synthesized
cactgtcttggtaacaaaca

SEQ ID NO: 57857 - DNA, 20 bp, Artificial Sequence
  chemically synthesized
attccctcttgagcctattt

SEQ ID NO: 57858 - DNA, 20 bp, Artificial Sequence
  chemically synthesized
tactagtgacgtttggcact

SEQ ID NO: 57859 - DNA, 20 bp, Artificial Sequence
  chemically synthesized
aatggggcagtcctcagtga

SEQ ID NO: 57860 - DNA, 20 bp, Artificial Sequence
  chemically synthesized
agagtggtcaaagcaatgtt

SEQ ID NO: 57861 - DNA, 20 bp, Artificial Sequence
  chemically synthesized
ttgatttgatcccagggaag

SEQ ID NO: 57862 - DNA, 20 bp, Artificial Sequence
  chemically synthesized
atgtcaggattccagattgg

SEQ ID NO: 57863 - DNA, 20 bp, Artificial Sequence
  chemically synthesized
gtctagggacctggaagagg

SEQ ID NO: 57864 - DNA, 20 bp, Artificial Sequence
  chemically synthesized
ttgctgaggaaacgtatctt

SEQ ID NO: 57865 - DNA, 20 bp, Artificial Sequence
  chemically synthesized
aactcacatttaaattctgc

SEQ ID NO: 57866 - DNA, 20 bp, Artificial Sequence
  chemically synthesized
ttaaattctgcacagaaaaa

SEQ ID NO: 57867 - DNA, 20 bp, Artificial Sequence
  chemically synthesized
gttttctgacagggaatgtc

SEQ ID NO: 57868 - DNA, 20 bp, Artificial Sequence
  chemically synthesized
cttctgccaagggcattctc

SEQ ID NO: 57869 - DNA, 20 bp, Artificial Sequence
  chemically synthesized
gcaacctttaggagatactg

SEQ ID NO: 57870 - DNA, 20 bp, Artificial Sequence
  chemically synthesized
aagatgaccaacagagcgac

SEQ ID NO: 57871 - DNA, 20 bp, Artificial Sequence
  chemically synthesized
gatccatctcccctggaaag

SEQ ID NO: 57872 - DNA, 20 bp, Artificial Sequence
  chemically synthesized
cagcaggcaagtcattctcc

SEQ ID NO: 57873 - DNA, 20 bp, Artificial Sequence
  chemically synthesized
ctgaagttgtctcgtatttg

SEQ ID NO: 57874 - DNA, 20 bp, Artificial Sequence
  chemically synthesized
agtcaacagcaaaattaggg

SEQ ID NO: 57875 - DNA, 20 bp, Artificial Sequence
  chemically synthesized
tgagcaggaatcatttctct

SEQ ID NO: 57876 - DNA, 20 bp, Artificial Sequence
  chemically synthesized
ttcttctacagctttgatgc

SEQ ID NO: 57877 - DNA, 20 bp, Artificial Sequence
  chemically synthesized
gtacttgggaggctgagatg

SEQ ID NO: 57878 - DNA, 20 bp, Artificial Sequence
  chemically synthesized
ggcctgaaaaaacaggacag

SEQ ID NO: 57879 - DNA, 20 bp, Artificial Sequence
  chemically synthesized
gaataagaaggacttgagga

SEQ ID NO: 57880 - DNA, 20 bp, Artificial Sequence
  chemically synthesized
ctcttcttcatctctgaggt

SEQ ID NO: 57881 - DNA, 20 bp, Artificial Sequence
  chemically synthesized
gaagttaggttggtgggtta

SEQ ID NO: 57882 - DNA, 20 bp, Artificial Sequence
  chemically synthesized
ggtcccatgaatctcataag

SEQ ID NO: 57883 - DNA, 20 bp, Artificial Sequence
  chemically synthesized
ttgttatccaactcactaat

SEQ ID NO: 57884 - DNA, 20 bp, Artificial Sequence
  chemically synthesized
tgaagaccaaaattagagca

SEQ ID NO: 57885 - DNA, 20 bp, Artificial Sequence
  chemically synthesized
tgcactactaggccaacaaa

SEQ ID NO: 57886 - DNA, 20 bp, Artificial Sequence
  chemically synthesized
gagcctcaggtttaactgga

SEQ ID NO: 57887 - DNA, 20 bp, Artificial Sequence
  chemically synthesized
caggtttaactggaaaagaa

SEQ ID NO: 57888 - DNA, 20 bp, Artificial Sequence
  chemically synthesized
gtcagtaaatggccaactat

SEQ ID NO: 57889 - DNA, 20 bp, Artificial Sequence
  chemically synthesized
ccttgtgagtgaggtgggca

SEQ ID NO: 57890 - DNA, 20 bp, Artificial Sequence
  chemically synthesized
ggagaagccccagctgcagg

SEQ ID NO: 57891 - DNA, 20 bp, Artificial Sequence
  chemically synthesized
cattttgactctgatgtgag

SEQ ID NO: 57892 - DNA, 20 bp, Artificial Sequence
  chemically synthesized
ctggccctggctaagacctt

SEQ ID NO: 57893 - DNA, 20 bp, Artificial Sequence
  chemically synthesized
atttcaggcagaacaaaccc

SEQ ID NO: 57894 - DNA, 20 bp, Artificial Sequence
  chemically synthesized
cagagaaaggtattgatttc

SEQ ID NO: 57895 - DNA, 20 bp, Artificial Sequence
  chemically synthesized
tgggtggagaacagccgaac

SEQ ID NO: 57896 - DNA, 20 bp, Artificial Sequence
  chemically synthesized
aaatgatttctttgagcaaa

SEQ ID NO: 57897 - DNA, 20 bp, Artificial Sequence
  chemically synthesized
catgctggtgtggagttttg

SEQ ID NO: 57898 - DNA, 20 bp, Artificial Sequence
  chemically synthesized
gtctgtctcaagagtacaat

SEQ ID NO: 57899 - DNA, 20 bp, Artificial Sequence
  chemically synthesized
ccacaaaagtcaatttctta

SEQ ID NO: 57900 - DNA, 20 bp, Artificial Sequence
  chemically synthesized
attgattccctttttttttt

SEQ ID NO: 57901 - DNA, 20 bp, Artificial Sequence
  chemically synthesized
gataagttagctaaacttac

SEQ ID NO: 57902 - DNA, 20 bp, Artificial Sequence
  chemically synthesized
acacctgggtttgaagatcc

SEQ ID NO: 57903 - DNA, 20 bp, Artificial Sequence
  chemically synthesized
tatttgtctacttttaacct

SEQ ID NO: 57904 - DNA, 20 bp, Artificial Sequence
  chemically synthesized
atattgctctttccaatcag

SEQ ID NO: 57905 - DNA, 20 bp, Artificial Sequence
  chemically synthesized
gatacttagtgatgatttac

SEQ ID NO: 57906 - DNA, 20 bp, Artificial Sequence
  chemically synthesized
atgttccataggaatatatg

SEQ ID NO: 57907 - DNA, 20 bp, Artificial Sequence
  chemically synthesized
tattgattaaaaaaagtgtt

SEQ ID NO: 57908 - DNA, 20 bp, Artificial Sequence
  chemically synthesized
tgaaccctaacaagagtggt

SEQ ID NO: 57909 - DNA, 20 bp, Artificial Sequence
  chemically synthesized
aattagtaaatctgacccac

SEQ ID NO: 57910 - DNA, 20 bp, Artificial Sequence
  chemically synthesized
tcaacagttatatttctctc

SEQ ID NO: 57911 - DNA, 20 bp, Artificial Sequence
  chemically synthesized
ttatcaataaacttcccccc

SEQ ID NO: 57912 - DNA, 20 bp, Artificial Sequence
  chemically synthesized
attctatcaaatgtataagg

SEQ ID NO: 57913 - DNA, 20 bp, Artificial Sequence
  chemically synthesized
tcaatctgacacaaattatt

SEQ ID NO: 57914 - DNA, 20 bp, Artificial Sequence
  chemically synthesized
ccaaacctggccaaaatatt

SEQ ID NO: 57915 - DNA, 20 bp, Artificial Sequence
  chemically synthesized
aatgtataagcaaactttca

SEQ ID NO: 57916 - DNA, 20 bp, Artificial Sequence
  chemically synthesized
tgttaaaaactcacagcaaa

SEQ ID NO: 57917 - DNA, 20 bp, Artificial Sequence
  chemically synthesized
aaactcacagcaaataagaa

SEQ ID NO: 57918 - DNA, 20 bp, Artificial Sequence
  chemically synthesized
tttagccaatgcataagaca

SEQ ID NO: 57919 - DNA, 20 bp, Artificial Sequence
  chemically synthesized
attagccatcaatggccatc

SEQ ID NO: 57920 - DNA, 20 bp, Artificial Sequence
  chemically synthesized
gacataccatctcacaccag

SEQ ID NO: 57921 - DNA, 20 bp, Artificial Sequence
  chemically synthesized
aaaggtgctggagggaatgt

SEQ ID NO: 57922 - DNA, 20 bp, Artificial Sequence
  chemically synthesized
gagtcctcaaggatccagag

SEQ ID NO: 57923 - DNA, 20 bp, Artificial Sequence
  chemically synthesized
ccatcaatgatagactggat

SEQ ID NO: 57924 - DNA, 20 bp, Artificial Sequence
  chemically synthesized
ctaaaactgtagaacattta

SEQ ID NO: 57925 - DNA, 20 bp, Artificial Sequence
  chemically synthesized
agaacatttaaaagaaaaca

SEQ ID NO: 57926 - DNA, 20 bp, Artificial Sequence
  chemically synthesized
tacaaaaagcactacatata

SEQ ID NO: 57927 - DNA, 20 bp, Artificial Sequence
  chemically synthesized
tgcttattaaaacgcaccag

SEQ ID NO: 57928 - DNA, 20 bp, Artificial Sequence
  chemically synthesized
agaaaataaaatggcaaact

SEQ ID NO: 57929 - DNA, 20 bp, Artificial Sequence
  chemically synthesized
ataaaatggcaaacttcaga

SEQ ID NO: 57930 - DNA, 20 bp, Artificial Sequence
  chemically synthesized
atctgacaaaggaaatgtat

SEQ ID NO: 57931 - DNA, 20 bp, Artificial Sequence
  chemically synthesized
catgcatcgctggaaggaga

SEQ ID NO: 57932 - DNA, 20 bp, Artificial Sequence
  chemically synthesized
ccattctgaggttttatacc

SEQ ID NO: 57933 - DNA, 20 bp, Artificial Sequence
  chemically synthesized
tatacacaaactgatttgtc

SEQ ID NO: 57934 - DNA, 20 bp, Artificial Sequence
  chemically synthesized
aacacaaatgttcatcaaga

SEQ ID NO: 57935 - DNA, 20 bp, Artificial Sequence
  chemically synthesized
caaatgttcatcaagaagag

SEQ ID NO: 57936 - DNA, 20 bp, Artificial Sequence
  chemically synthesized
cactggttaaatgaaagaag

SEQ ID NO: 57937 - DNA, 20 bp, Artificial Sequence
  chemically synthesized
gttaaatgaaagaagacaga

SEQ ID NO: 57938 - DNA, 20 bp, Artificial Sequence
  chemically synthesized
tattctattaataagaacta

SEQ ID NO: 57939 - DNA, 20 bp, Artificial Sequence
  chemically synthesized
ctggcaaaaaccaaagggta

SEQ ID NO: 57940 - DNA, 20 bp, Artificial Sequence
  chemically synthesized
aaaccaaagggtaatagaat

SEQ ID NO: 57941 - DNA, 20 bp, Artificial Sequence
  chemically synthesized
taaaatgcattgtaatcaaa

SEQ ID NO: 57942 - DNA, 20 bp, Artificial Sequence
  chemically synthesized
ttgtaatcaaacaagaaagc

SEQ ID NO: 57943 - DNA, 20 bp, Artificial Sequence
  chemically synthesized
tatatattctcattgtaaag

SEQ ID NO: 57944 - DNA, 20 bp, Artificial Sequence
  chemically synthesized
tggaagtgaagatctgggca

SEQ ID NO: 57945 - DNA, 20 bp, Artificial Sequence
  chemically synthesized
tgggtaagtttgcgtatatg

SEQ ID NO: 57946 - DNA, 20 bp, Artificial Sequence
  chemically synthesized
tgtgctcaaatgagtccttt

SEQ ID NO: 57947 - DNA, 20 bp, Artificial Sequence
  chemically synthesized
agagtgccctagcttttgtt

SEQ ID NO: 57948 - DNA, 20 bp, Artificial Sequence
  chemically synthesized
catgaaaactagagattggt

SEQ ID NO: 57949 - DNA, 20 bp, Artificial Sequence
  chemically synthesized
tttaggtaaacatgggatgt

SEQ ID NO: 57950 - DNA, 20 bp, Artificial Sequence
  chemically synthesized
ttttagttcaattcttgagt

SEQ ID NO: 57951 - DNA, 20 bp, Artificial Sequence
  chemically synthesized
tcagctcattcccatgattt

SEQ ID NO: 57952 - DNA, 20 bp, Artificial Sequence
  chemically synthesized
tatggtgtgaatgaaagtga

SEQ ID NO: 57953 - DNA, 20 bp, Artificial Sequence
  chemically synthesized
ggtcaacctcagcttggcca

SEQ ID NO: 57954 - DNA, 20 bp, Artificial Sequence
  chemically synthesized
atgtttatctaaggactgca

SEQ ID NO: 57955 - DNA, 20 bp, Artificial Sequence
  chemically synthesized
ttgtttggactatagactgt

SEQ ID NO: 57956 - DNA, 20 bp, Artificial Sequence
  chemically synthesized
aatttggagatagcctcagg

SEQ ID NO: 57957 - DNA, 20 bp, Artificial Sequence
  chemically synthesized
tagaagttaggtcaatattc

SEQ ID NO: 57958 - DNA, 20 bp, Artificial Sequence
  chemically synthesized
acttccaactggctatagca

SEQ ID NO: 57959 - DNA, 20 bp, Artificial Sequence
  chemically synthesized
tggattatgtagtattcaag

SEQ ID NO: 57960 - DNA, 20 bp, Artificial Sequence
  chemically synthesized
gaaaagcccaagggcaaaga

SEQ ID NO: 57961 - DNA, 20 bp, Artificial Sequence
  chemically synthesized
aatgctaacagagttttcca

SEQ ID NO: 57962 - DNA, 20 bp, Artificial Sequence
  chemically synthesized
caatgatagctatcttgcag

SEQ ID NO: 57963 - DNA, 20 bp, Artificial Sequence
  chemically synthesized
tagattctagcaggatgctg

SEQ ID NO: 57964 - DNA, 20 bp, Artificial Sequence
  chemically synthesized
ttgtatgtatgttttacatg

SEQ ID NO: 57965 - DNA, 20 bp, Artificial Sequence
  chemically synthesized
gtgaggctggaataaatatg

SEQ ID NO: 57966 - DNA, 20 bp, Artificial Sequence
  chemically synthesized
aatatacacccactgggacc

SEQ ID NO: 57967 - DNA, 20 bp, Artificial Sequence
  chemically synthesized
gtatttttggttcatcagta

SEQ ID NO: 57968 - DNA, 20 bp, Artificial Sequence
  chemically synthesized
tccaaggctttacactggag

SEQ ID NO: 57969 - DNA, 20 bp, Artificial Sequence
  chemically synthesized
atttgtttttctggccattc

SEQ ID NO: 57970 - DNA, 20 bp, Artificial Sequence
  chemically synthesized
gggcagagttgctttgtaac

SEQ ID NO: 57971 - DNA, 20 bp, Artificial Sequence
  chemically synthesized
aatgtgatggcattttacaa

SEQ ID NO: 57972 - DNA, 20 bp, Artificial Sequence
  chemically synthesized
gctatgagtataatattttc

SEQ ID NO: 57973 - DNA, 20 bp, Artificial Sequence
  chemically synthesized
taagtaatgaaaaggtaaaa

SEQ ID NO: 57974 - DNA, 20 bp, Artificial Sequence
  chemically synthesized
cttgatcatccttgtgatga

SEQ ID NO: 57975 - DNA, 20 bp, Artificial Sequence
  chemically synthesized
aatccaaggcaaagtttagc

SEQ ID NO: 57976 - DNA, 20 bp, Artificial Sequence
  chemically synthesized
ctctctgacaattcccttaa

SEQ ID NO: 57977 - DNA, 20 bp, Artificial Sequence
  chemically synthesized
aaatagtttttaactcttaa

SEQ ID NO: 57978 - DNA, 20 bp, Artificial Sequence
  chemically synthesized
ctaagttttttagatcccaa

SEQ ID NO: 57979 - DNA, 20 bp, Artificial Sequence
  chemically synthesized
gagtgaaatgcattccttct

SEQ ID NO: 57980 - DNA, 20 bp, Artificial Sequence
  chemically synthesized
tacagataatccaaaatcca

SEQ ID NO: 57981 - DNA, 20 bp, Artificial Sequence
  chemically synthesized
tccaaaatccataagaaaac

SEQ ID NO: 57982 - DNA, 20 bp, Artificial Sequence
  chemically synthesized
tttgagcatagccactttct

SEQ ID NO: 57983 - DNA, 20 bp, Artificial Sequence
  chemically synthesized
ctccagaaacgacttgaagt

SEQ ID NO: 57984 - DNA, 20 bp, Artificial Sequence
  chemically synthesized
aaccatgccaaaagttgtac

SEQ ID NO: 57985 - DNA, 20 bp, Artificial Sequence
  chemically synthesized
ataattctttttgggatcta

SEQ ID NO: 57986 - DNA, 20 bp, Artificial Sequence
  chemically synthesized
taaacacattgtaattataa

SEQ ID NO: 57987 - DNA, 20 bp, Artificial Sequence
  chemically synthesized
gccctttctctttaagagtt

SEQ ID NO: 57988 - DNA, 20 bp, Artificial Sequence
  chemically synthesized
tcaaaagctctatgtaattt

SEQ ID NO: 57989 - DNA, 20 bp, Artificial Sequence
  chemically synthesized
aaagccagtgagctgcttcc

SEQ ID NO: 57990 - DNA, 20 bp, Artificial Sequence
  chemically synthesized
tggattctgggaatggccag

SEQ ID NO: 57991 - DNA, 20 bp, Artificial Sequence
  chemically synthesized
cagcctcactttctatcatg

SEQ ID NO: 57992 - DNA, 20 bp, Artificial Sequence
  chemically synthesized
agatttcattatagggtcta

SEQ ID NO: 57993 - DNA, 20 bp, Artificial Sequence
  chemically synthesized
aatgtaacaaatgtagcaga

SEQ ID NO: 57994 - DNA, 20 bp, Artificial Sequence
  chemically synthesized
tggattttttttttctattg

SEQ ID NO: 57995 - DNA, 20 bp, Artificial Sequence
  chemically synthesized
gaaactccttgtccttcacc

SEQ ID NO: 57996 - DNA, 20 bp, Artificial Sequence
  chemically synthesized
aggctggaaatggattgcac

SEQ ID NO: 57997 - DNA, 20 bp, Artificial Sequence
  chemically synthesized
gagcttaaacagcacatagg

SEQ ID NO: 57998 - DNA, 20 bp, Artificial Sequence
  chemically synthesized
attttcatttttctggggta

SEQ ID NO: 57999 - DNA, 20 bp, Artificial Sequence
  chemically synthesized
ctcaaacaaatttacaagaa

SEQ ID NO: 58000 - DNA, 20 bp, Artificial Sequence
  chemically synthesized
ctcttgtcttatgcattggc

SEQ ID NO: 58001 - DNA, 20 bp, Artificial Sequence
  chemically synthesized
atttactaatttgtgtttat

SEQ ID NO: 58002 - DNA, 20 bp, Artificial Sequence
  chemically synthesized
ttgtcacttttgggctacct

SEQ ID NO: 58003 - DNA, 20 bp, Artificial Sequence
  chemically synthesized
caggggagagcccattctta

SEQ ID NO: 58004 - DNA, 20 bp, Artificial Sequence
  chemically synthesized
agaaatcatttgagcttgag

SEQ ID NO: 58005 - DNA, 20 bp, Artificial Sequence
  chemically synthesized
ttacaacccatccaagggtg

SEQ ID NO: 58006 - DNA, 20 bp, Artificial Sequence
  chemically synthesized
cttaccgccaggaaaaggat

SEQ ID NO: 58007 - DNA, 20 bp, Artificial Sequence
  chemically synthesized
ttcaactacattaataaaat

SEQ ID NO: 58008 - DNA, 20 bp, Artificial Sequence
  chemically synthesized
tctcccaatattggccccat

SEQ ID NO: 58009 - DNA, 20 bp, Artificial Sequence
  chemically synthesized
ggactcttataaatcattaa

SEQ ID NO: 58010 - DNA, 20 bp, Artificial Sequence
  chemically synthesized
taagccccatttattgatga

SEQ ID NO: 58011 - DNA, 20 bp, Artificial Sequence
  chemically synthesized
ttctgtgacattccctgtca

SEQ ID NO: 58012 - DNA, 20 bp, Artificial Sequence
  chemically synthesized
tcaccatgtccagcttctac

SEQ ID NO: 58013 - DNA, 20 bp, Artificial Sequence
  chemically synthesized
cacagagaagacaaaattag

SEQ ID NO: 58014 - DNA, 20 bp, Artificial Sequence
  chemically synthesized
atccctccgggacaatgagc

SEQ ID NO: 58015 - DNA, 20 bp, Artificial Sequence
  chemically synthesized
caaagggcagatgctgcaca

SEQ ID NO: 58016 - DNA, 20 bp, Artificial Sequence
  chemically synthesized
gcattctgcctcataaattg

SEQ ID NO: 58017 - DNA, 20 bp, Artificial Sequence
  chemically synthesized
ttattttctttgacttatgg

SEQ ID NO: 58018 - DNA, 20 bp, Artificial Sequence
  chemically synthesized
aaatgaagagatgaccatag

SEQ ID NO: 58019 - DNA, 20 bp, Artificial Sequence
  chemically synthesized
gaggagagcactttggaaag

SEQ ID NO: 58020 - DNA, 20 bp, Artificial Sequence
  chemically synthesized
aaggtccattcatccacagt

SEQ ID NO: 58021 - DNA, 20 bp, Artificial Sequence
  chemically synthesized
aaccccattcacagacaaca

SEQ ID NO: 58022 - DNA, 20 bp, Artificial Sequence
  chemically synthesized
cattcacagacaacacaaaa

SEQ ID NO: 58023 - DNA, 20 bp, Artificial Sequence
  chemically synthesized
acacaaaacaaaacaaacaa

SEQ ID NO: 58024 - DNA, 20 bp, Artificial Sequence
  chemically synthesized
ctagtccccctaaataaagt

SEQ ID NO: 58025 - DNA, 20 bp, Artificial Sequence
  chemically synthesized
acagaacaaagaagaaaatt

SEQ ID NO: 58026 - DNA, 20 bp, Artificial Sequence
  chemically synthesized
aagaagaaaattcaaaacag

SEQ ID NO: 58027 - DNA, 20 bp, Artificial Sequence
  chemically synthesized
cagtagcaacaaatctcaaa

SEQ ID NO: 58028 - DNA, 20 bp, Artificial Sequence
  chemically synthesized
ctgaggaaacgtatcttgca

SEQ ID NO: 58029 - DNA, 20 bp, Artificial Sequence
  chemically synthesized
cacaacactttttaagcacc

SEQ ID NO: 58030 - DNA, 20 bp, Artificial Sequence
  chemically synthesized
taatttaacaagtgcatgtt

SEQ ID NO: 58031 - DNA, 20 bp, Artificial Sequence
  chemically synthesized
gaccaacagagcgacagaga

SEQ ID NO: 58032 - DNA, 20 bp, Artificial Sequence
  chemically synthesized
gcaaagcactctgagggaac

SEQ ID NO: 58033 - DNA, 20 bp, Artificial Sequence
  chemically synthesized
tattatctttaagattaaaa

SEQ ID NO: 58034 - DNA, 20 bp, Artificial Sequence
  chemically synthesized
ttagtttaattttttttaat

SEQ ID NO: 58035 - DNA, 20 bp, Artificial Sequence
  chemically synthesized
caaggccaatcttggcctga

SEQ ID NO: 58036 - DNA, 20 bp, Artificial Sequence
  chemically synthesized
aaaaattaagctgttacttc

SEQ ID NO: 58037 - DNA, 20 bp, Artificial Sequence
  chemically synthesized
aagaccttgggctttaaaat

SEQ ID NO: 58038 - DNA, 20 bp, Artificial Sequence
  chemically synthesized
cttgggctttaaaataaaaa

SEQ ID NO: 58039 - DNA, 20 bp, Artificial Sequence
  chemically synthesized
agaccaaaattagagcagaa

SEQ ID NO: 58040 - DNA, 20 bp, Artificial Sequence
  chemically synthesized
actactaggccaacaaaata

SEQ ID NO: 58041 - DNA, 20 bp, Artificial Sequence
  chemically synthesized
cggtaagctacatcgtgcat

SEQ ID NO: 58042 - DNA, 20 bp, Artificial Sequence
  chemically synthesized
agtaaatggccaactattca

SEQ ID NO: 58043 - DNA, 20 bp, Artificial Sequence
  chemically synthesized
agctagtgttaattttacac

SEQ ID NO: 58044 - DNA, 20 bp, Artificial Sequence
  chemically synthesized
attttatcatcttagtgaaa

SEQ ID NO: 58045 - DNA, 20 bp, Artificial Sequence
  chemically synthesized
gattcccttttttttttgta

SEQ ID NO: 58046 - DNA, 20 bp, Artificial Sequence
  chemically synthesized
atttttataattgatcactg

SEQ ID NO: 58047 - DNA, 20 bp, Artificial Sequence
  chemically synthesized
accctaacaagagtggttaa

SEQ ID NO: 58048 - DNA, 20 bp, Artificial Sequence
  chemically synthesized
tcaataaacttccccccaaa

SEQ ID NO: 58049 - DNA, 20 bp, Artificial Sequence
  chemically synthesized
tgaatgcatctattcatgtt

SEQ ID NO: 58050 - DNA, 20 bp, Artificial Sequence
  chemically synthesized
gccatcagagaaatgcaaat

SEQ ID NO: 58051 - DNA, 20 bp, Artificial Sequence
  chemically synthesized
taaagtataataataattaa

SEQ ID NO: 58052 - DNA, 20 bp, Artificial Sequence
  chemically synthesized
aaaaaactaaatataaaggc

SEQ ID NO: 58053 - DNA, 20 bp, Artificial Sequence
  chemically synthesized
aaactgtagaacatttaaaa

SEQ ID NO: 58054 - DNA, 20 bp, Artificial Sequence
  chemically synthesized
tagactccatcaaaataaaa

SEQ ID NO: 58055 - DNA, 20 bp, Artificial Sequence
  chemically synthesized
aaaaaaaaactcttgcttat

SEQ ID NO: 58056 - DNA, 20 bp, Artificial Sequence
  chemically synthesized
ttatttgacaaatgcgaatt

SEQ ID NO: 58057 - DNA, 20 bp, Artificial Sequence
  chemically synthesized
agaatggtataaccactttg

SEQ ID NO: 58058 - DNA, 20 bp, Artificial Sequence
  chemically synthesized
aataatagtctcaaacttga

SEQ ID NO: 58059 - DNA, 20 bp, Artificial Sequence
  chemically synthesized
aagaactatcagaaactggc

SEQ ID NO: 58060 - DNA, 20 bp, Artificial Sequence
  chemically synthesized
ggttaagctcctacagtcat

SEQ ID NO: 58061 - DNA, 20 bp, Artificial Sequence
  chemically synthesized
attattttggggacattcct

SEQ ID NO: 58062 - DNA, 20 bp, Artificial Sequence
  chemically synthesized
acttggaacaggataaaaat

SEQ ID NO: 58063 - DNA, 20 bp, Artificial Sequence
  chemically synthesized
tcatacatatattttccact

SEQ ID NO: 58064 - DNA, 20 bp, Artificial Sequence
  chemically synthesized
gaaatatctgaatccaattg

SEQ ID NO: 58065 - DNA, 20 bp, Artificial Sequence
  chemically synthesized
ggaagctcccataaattgac

SEQ ID NO: 58066 - DNA, 20 bp, Artificial Sequence
  chemically synthesized
acataactttctctaggtca

SEQ ID NO: 58067 - DNA, 20 bp, Artificial Sequence
  chemically synthesized
gaggatgtctaagcaaccat

SEQ ID NO: 58068 - DNA, 20 bp, Artificial Sequence
  chemically synthesized
caaagacaagaaaaatgctt

SEQ ID NO: 58069 - DNA, 20 bp, Artificial Sequence
  chemically synthesized
tcaaaaccaaccaaccaaca

SEQ ID NO: 58070 - DNA, 20 bp, Artificial Sequence
  chemically synthesized
caaccaaccaacaaaaaaca

SEQ ID NO: 58071 - DNA, 20 bp, Artificial Sequence
  chemically synthesized
accaacaaaaaacaaaaaac

SEQ ID NO: 58072 - DNA, 20 bp, Artificial Sequence
  chemically synthesized
gaaacttaaaaagttggagt

SEQ ID NO: 58073 - DNA, 20 bp, Artificial Sequence
  chemically synthesized
aaaatctcacataaatctct

SEQ ID NO: 58074 - DNA, 20 bp, Artificial Sequence
  chemically synthesized
tctcaaaactaaagtatttt

SEQ ID NO: 58075 - DNA, 20 bp, Artificial Sequence
  chemically synthesized
agataatccaaaatccataa

SEQ ID NO: 58076 - DNA, 20 bp, Artificial Sequence
  chemically synthesized
gaaacgacttgaagtaaaga

SEQ ID NO: 58077 - DNA, 20 bp, Artificial Sequence
  chemically synthesized
ataagtataaagccctagat

SEQ ID NO: 58078 - DNA, 20 bp, Artificial Sequence
  chemically synthesized
attctaggtacaacttttgg

SEQ ID NO: 58079 - DNA, 20 bp, Artificial Sequence
  chemically synthesized
atggttttttctttacttca

SEQ ID NO: 58080 - DNA, 20 bp, Artificial Sequence
  chemically synthesized
ctcaaaatggtgagtcattt

SEQ ID NO: 58081 - DNA, 20 bp, Artificial Sequence
  chemically synthesized
gagtcatttctaagttttct

SEQ ID NO: 58082 - DNA, 20 bp, Artificial Sequence
  chemically synthesized
ttctaagttttcttatggat

SEQ ID NO: 58083 - DNA, 20 bp, Artificial Sequence
  chemically synthesized
ggattttggattatctgtag

SEQ ID NO: 58084 - DNA, 20 bp, Artificial Sequence
  chemically synthesized
taacagacctgagtcaggca

SEQ ID NO: 58085 - DNA, 20 bp, Artificial Sequence
  chemically synthesized
agtcaggcactgggtttgaa

SEQ ID NO: 58086 - DNA, 20 bp, Artificial Sequence
  chemically synthesized
acatattcagtcattttttt

SEQ ID NO: 58087 - DNA, 20 bp, Artificial Sequence
  chemically synthesized
ggcaggggatcaatactatg

SEQ ID NO: 58088 - DNA, 20 bp, Artificial Sequence
  chemically synthesized
aagtgtagatcttaaatgtt

SEQ ID NO: 58089 - DNA, 20 bp, Artificial Sequence
  chemically synthesized
ttaccttgtcaggagatcaa

SEQ ID NO: 58090 - DNA, 20 bp, Artificial Sequence
  chemically synthesized
aggagatcaaactggattca

SEQ ID NO: 58091 - DNA, 20 bp, Artificial Sequence
  chemically synthesized
ataaggtaatgtacagaagc

SEQ ID NO: 58092 - DNA, 20 bp, Artificial Sequence
  chemically synthesized
agacatccaataacttttga

SEQ ID NO: 58093 - DNA, 20 bp, Artificial Sequence
  chemically synthesized
tgaaagtgttttcaaaatac

SEQ ID NO: 58094 - DNA, 20 bp, Artificial Sequence
  chemically synthesized
tttcaaaatactttagtttt

SEQ ID NO: 58095 - DNA, 20 bp, Artificial Sequence
  chemically synthesized
tttagttttgagagatttat

SEQ ID NO: 58096 - DNA, 20 bp, Artificial Sequence
  chemically synthesized
ctgactagagaaagatctaa

SEQ ID NO: 58097 - DNA, 20 bp, Artificial Sequence
  chemically synthesized
taattataacaaaactaggc

SEQ ID NO: 58098 - DNA, 20 bp, Artificial Sequence
  chemically synthesized
caaacacatcagcctaatga

SEQ ID NO: 58099 - DNA, 20 bp, Artificial Sequence
  chemically synthesized
tctcattaagggaattgtca

SEQ ID NO: 58100 - DNA, 20 bp, Artificial Sequence
  chemically synthesized
tatatgactcactttatggg

SEQ ID NO: 58101 - DNA, 20 bp, Artificial Sequence
  chemically synthesized
tattctatgctaaactttgc

SEQ ID NO: 58102 - DNA, 20 bp, Artificial Sequence
  chemically synthesized
ataagaatgctagttgaaag

SEQ ID NO: 58103 - DNA, 20 bp, Artificial Sequence
  chemically synthesized
tgggttttcactccaacttt

SEQ ID NO: 58104 - DNA, 20 bp, Artificial Sequence
  chemically synthesized
ttcactccaactttttaagt

SEQ ID NO: 58105 - DNA, 20 bp, Artificial Sequence
  chemically synthesized
gatgtataattaccctattc

SEQ ID NO: 58106 - DNA, 20 bp, Artificial Sequence
  chemically synthesized
atgattacgtcaaaatactt

SEQ ID NO: 58107 - DNA, 20 bp, Artificial Sequence
  chemically synthesized
tataggaattcacattcagt

SEQ ID NO: 58108 - DNA, 20 bp, Artificial Sequence
  chemically synthesized
gaagaagacttctagatgac

SEQ ID NO: 58109 - DNA, 20 bp, Artificial Sequence
  chemically synthesized
ttattgagcatttaaagaat

SEQ ID NO: 58110 - DNA, 20 bp, Artificial Sequence
  chemically synthesized
aactttttaaagagaagctc

SEQ ID NO: 58111 - DNA, 20 bp, Artificial Sequence
  chemically synthesized
cctctttgtaaatatccatt

SEQ ID NO: 58112 - DNA, 20 bp, Artificial Sequence
  chemically synthesized
attcagtgattgctcatagc

SEQ ID NO: 58113 - DNA, 20 bp, Artificial Sequence
  chemically synthesized
tatctactgaaaagccagtg

SEQ ID NO: 58114 - DNA, 20 bp, Artificial Sequence
  chemically synthesized
taaatggctcattgtatatt

SEQ ID NO: 58115 - DNA, 20 bp, Artificial Sequence
  chemically synthesized
taccctgctgaaactacata

SEQ ID NO: 58116 - DNA, 20 bp, Artificial Sequence
  chemically synthesized
ggtggcagaactgtgaactg

SEQ ID NO: 58117 - DNA, 20 bp, Artificial Sequence
  chemically synthesized
cacacccatggtctagctag

SEQ ID NO: 58118 - DNA, 20 bp, Artificial Sequence
  chemically synthesized
catggtctagctagggctgt

SEQ ID NO: 58119 - DNA, 20 bp, Artificial Sequence
  chemically synthesized
agctagggctgtttgagatt

SEQ ID NO: 58120 - DNA, 20 bp, Artificial Sequence
  chemically synthesized
aactggttggtccattcaca

SEQ ID NO: 58121 - DNA, 20 bp, Artificial Sequence
  chemically synthesized
ttggtctctgggacaatcaa

SEQ ID NO: 58122 - DNA, 20 bp, Artificial Sequence
  chemically synthesized
ctctgggacaatcaactggg

SEQ ID NO: 58123 - DNA, 20 bp, Artificial Sequence
  chemically synthesized
tcacacttgagcactctgag

SEQ ID NO: 58124 - DNA, 20 bp, Artificial Sequence
  chemically synthesized
cttgagcactctgagaatgg

SEQ ID NO: 58125 - DNA, 20 bp, Artificial Sequence
  chemically synthesized
ctgagaatggctttgcttac

SEQ ID NO: 58126 - DNA, 20 bp, Artificial Sequence
  chemically synthesized
tgtaaaacatacatacaaaa

SEQ ID NO: 58127 - DNA, 20 bp, Artificial Sequence
  chemically synthesized
tttcattatagggtctacaa

SEQ ID NO: 58128 - DNA, 20 bp, Artificial Sequence
  chemically synthesized
cagtatgtacaacattcaca

SEQ ID NO: 58129 - DNA, 20 bp, Artificial Sequence
  chemically synthesized
atctaattttttttccctaa

SEQ ID NO: 58130 - DNA, 20 bp, Artificial Sequence
  chemically synthesized
taatcacgtttgtctcagtc

SEQ ID NO: 58131 - DNA, 20 bp, Artificial Sequence
  chemically synthesized
aatactagggagggaataaa

SEQ ID NO: 58132 - DNA, 20 bp, Artificial Sequence
  chemically synthesized
gatttgtaataaagtgaaaa

SEQ ID NO: 58133 - DNA, 20 bp, Artificial Sequence
  chemically synthesized
acaaatgtagcagaaaaaac

SEQ ID NO: 58134 - DNA, 20 bp, Artificial Sequence
  chemically synthesized
ggaggttacttactcattat

SEQ ID NO: 58135 - DNA, 20 bp, Artificial Sequence
  chemically synthesized
tggaaaactctgttagcatt

SEQ ID NO: 58136 - DNA, 20 bp, Artificial Sequence
  chemically synthesized
actctgttagcattgagcgt

SEQ ID NO: 58137 - DNA, 20 bp, Artificial Sequence
  chemically synthesized
tagcattgagcgtttttgtt

SEQ ID NO: 58138 - DNA, 20 bp, Artificial Sequence
  chemically synthesized
tttttgttttttgttggttg

SEQ ID NO: 58139 - DNA, 20 bp, Artificial Sequence
  chemically synthesized
catttttcttgtctttgccc

SEQ ID NO: 58140 - DNA, 20 bp, Artificial Sequence
  chemically synthesized
tatttcaaaaggatgcattt

SEQ ID NO: 58141 - DNA, 20 bp, Artificial Sequence
  chemically synthesized
tatttgtttcattaacagct

SEQ ID NO: 58142 - DNA, 20 bp, Artificial Sequence
  chemically synthesized
ggatcgcagcactcactgac

SEQ ID NO: 58143 - DNA, 20 bp, Artificial Sequence
  chemically synthesized
tttgaaatatggtgagggat

SEQ ID NO: 58144 - DNA, 20 bp, Artificial Sequence
  chemically synthesized
tgagggatggtggttttaat

SEQ ID NO: 58145 - DNA, 20 bp, Artificial Sequence
  chemically synthesized
atacaaatctcctctcacgg

SEQ ID NO: 58146 - DNA, 20 bp, Artificial Sequence
  chemically synthesized
tacaacacttctcaccaaaa

SEQ ID NO: 58147 - DNA, 20 bp, Artificial Sequence
  chemically synthesized
tgcatctgagagttaaactg

SEQ ID NO: 58148 - DNA, 20 bp, Artificial Sequence
  chemically synthesized
cttgtttccaatcccaatac

SEQ ID NO: 58149 - DNA, 20 bp, Artificial Sequence
  chemically synthesized
caatcccaataccagtgctt

SEQ ID NO: 58150 - DNA, 20 bp, Artificial Sequence
  chemically synthesized
gttatgtaatgtatctatgc

SEQ ID NO: 58151 - DNA, 20 bp, Artificial Sequence
  chemically synthesized
tccacaggaataagttggca

SEQ ID NO: 58152 - DNA, 20 bp, Artificial Sequence
  chemically synthesized
gaaaagacaaaggaaaagag

SEQ ID NO: 58153 - DNA, 20 bp, Artificial Sequence
  chemically synthesized
aaaggaaaagagtctggttt

SEQ ID NO: 58154 - DNA, 20 bp, Artificial Sequence
  chemically synthesized
ttgccaagggttactatctc

SEQ ID NO: 58155 - DNA, 20 bp, Artificial Sequence
  chemically synthesized
ctggtgatttgagaaactac

SEQ ID NO: 58156 - DNA, 20 bp, Artificial Sequence
  chemically synthesized
aagatccaccagtagtaata

SEQ ID NO: 58157 - DNA, 20 bp, Artificial Sequence
  chemically synthesized
agtccaaacaagccctgaat

SEQ ID NO: 58158 - DNA, 20 bp, Artificial Sequence
  chemically synthesized
tccagtttttgtcaatttat

SEQ ID NO: 58159 - DNA, 20 bp, Artificial Sequence
  chemically synthesized
gcttcctgcatctatttatg

SEQ ID NO: 58160 - DNA, 20 bp, Artificial Sequence
  chemically synthesized
tgtccacaatctaggctgga

SEQ ID NO: 58161 - DNA, 20 bp, Artificial Sequence
  chemically synthesized
ggcaaatcactctcccacac

SEQ ID NO: 58162 - DNA, 20 bp, Artificial Sequence
  chemically synthesized
ctcccacacggaggtttgac

SEQ ID NO: 58163 - DNA, 20 bp, Artificial Sequence
  chemically synthesized
ctggtgggctgagtgttcat

SEQ ID NO: 58164 - DNA, 20 bp, Artificial Sequence
  chemically synthesized
ctgtccagagcctcctctat

SEQ ID NO: 58165 - DNA, 20 bp, Artificial Sequence
  chemically synthesized
tcctctatttgggttttcca

SEQ ID NO: 58166 - DNA, 20 bp, Artificial Sequence
  chemically synthesized
aagggactgccttaagaaag

SEQ ID NO: 58167 - DNA, 20 bp, Artificial Sequence
  chemically synthesized
tcagagcccttaaaaggatg

SEQ ID NO: 58168 - DNA, 20 bp, Artificial Sequence
  chemically synthesized
caagacagccatacggtcat

SEQ ID NO: 58169 - DNA, 20 bp, Artificial Sequence
  chemically synthesized
attgaactaaaagttattgt

SEQ ID NO: 58170 - DNA, 20 bp, Artificial Sequence
  chemically synthesized
tgtcctagtttctccacatc

SEQ ID NO: 58171 - DNA, 20 bp, Artificial Sequence
  chemically synthesized
catcttcagatctttccacc

SEQ ID NO: 58172 - DNA, 20 bp, Artificial Sequence
  chemically synthesized
ctttccacctgatgtttgtc

SEQ ID NO: 58173 - DNA, 20 bp, Artificial Sequence
  chemically synthesized
agcttattccctggtatctg

SEQ ID NO: 58174 - DNA, 20 bp, Artificial Sequence
  chemically synthesized
ctgtctagcttacccaaaaa

SEQ ID NO: 58175 - DNA, 20 bp, Artificial Sequence
  chemically synthesized
aagatagcagttaacaaaag

SEQ ID NO: 58176 - DNA, 20 bp, Artificial Sequence
  chemically synthesized
caaaagtaacgatttgggag

SEQ ID NO: 58177 - DNA, 20 bp, Artificial Sequence
  chemically synthesized
ttaacatttcttcaccaatc

SEQ ID NO: 58178 - DNA, 20 bp, Artificial Sequence
  chemically synthesized
tctctagttttcatgactgt

SEQ ID NO: 58179 - DNA, 20 bp, Artificial Sequence
  chemically synthesized
gaccacaataaaccaaaggt

SEQ ID NO: 58180 - DNA, 20 bp, Artificial Sequence
  chemically synthesized
gccttcctagaacacactcc

SEQ ID NO: 58181 - DNA, 20 bp, Artificial Sequence
  chemically synthesized
acctctttagagctatttgg

SEQ ID NO: 58182 - DNA, 20 bp, Artificial Sequence
  chemically synthesized
taggaaaaacaaattggtaa

SEQ ID NO: 58183 - DNA, 20 bp, Artificial Sequence
  chemically synthesized
tacattatttacttattttt

SEQ ID NO: 58184 - DNA, 20 bp, Artificial Sequence
  chemically synthesized
ttacttatttttctttgctt

SEQ ID NO: 58185 - DNA, 20 bp, Artificial Sequence
  chemically synthesized
ttatttttctttgctttctt

SEQ ID NO: 58186 - DNA, 20 bp, Artificial Sequence
  chemically synthesized
aacttatttttcccctagaa

SEQ ID NO: 58187 - DNA, 20 bp, Artificial Sequence
  chemically synthesized
aattctcaattctattaccc

SEQ ID NO: 58188 - DNA, 20 bp, Artificial Sequence
  chemically synthesized
tctattaccctttggttttt

SEQ ID NO: 58189 - DNA, 20 bp, Artificial Sequence
  chemically synthesized
tctgtcttctttcatttaac

SEQ ID NO: 58190 - DNA, 20 bp, Artificial Sequence
  chemically synthesized
tttctcttcttgatgaacat

SEQ ID NO: 58191 - DNA, 20 bp, Artificial Sequence
  chemically synthesized
tgatgaacatttgtgttttt

SEQ ID NO: 58192 - DNA, 20 bp, Artificial Sequence
  chemically synthesized
ctgttcacattcttggacaa

SEQ ID NO: 58193 - DNA, 20 bp, Artificial Sequence
  chemically synthesized
gtcataaggtaagcatgtat

SEQ ID NO: 58194 - DNA, 20 bp, Artificial Sequence
  chemically synthesized
aagtttataagaaaccgccc

SEQ ID NO: 58195 - DNA, 20 bp, Artificial Sequence
  chemically synthesized
tgagagatatacatcatttg

SEQ ID NO: 58196 - DNA, 20 bp, Artificial Sequence
  chemically synthesized
gactttgggatagtatctcg

SEQ ID NO: 58197 - DNA, 20 bp, Artificial Sequence
  chemically synthesized
ttgtcaaataacaaatgttg

SEQ ID NO: 58198 - DNA, 20 bp, Artificial Sequence
  chemically synthesized
attgcatctattttctattc

SEQ ID NO: 58199 - DNA, 20 bp, Artificial Sequence
  chemically synthesized
gccattttattttcttactg

SEQ ID NO: 58200 - DNA, 20 bp, Artificial Sequence
  chemically synthesized
actggtgcgttttaataagc

SEQ ID NO: 58201 - DNA, 20 bp, Artificial Sequence
  chemically synthesized
catttattttcttttatatg

SEQ ID NO: 58202 - DNA, 20 bp, Artificial Sequence
  chemically synthesized
aaagttgggaagatattttc

SEQ ID NO: 58203 - DNA, 20 bp, Artificial Sequence
  chemically synthesized
atgttttcttttaaatgttc

SEQ ID NO: 58204 - DNA, 20 bp, Artificial Sequence
  chemically synthesized
ctacagttttagcctttata

SEQ ID NO: 58205 - DNA, 20 bp, Artificial Sequence
  chemically synthesized
agggtacatgtgcacaacgt

SEQ ID NO: 58206 - DNA, 20 bp, Artificial Sequence
  chemically synthesized
tgtgccatgttggtgtgctg

SEQ ID NO: 58207 - DNA, 20 bp, Artificial Sequence
  chemically synthesized
catctatgagtgagaacatg

SEQ ID NO: 58208 - DNA, 20 bp, Artificial Sequence
  chemically synthesized
tatgagtgagaacatgcagt

SEQ ID NO: 58209 - DNA, 20 bp, Artificial Sequence
  chemically synthesized
gtttgattttttgtccttgt

SEQ ID NO: 58210 - DNA, 20 bp, Artificial Sequence
  chemically synthesized
tgtgatagtttgctgagaat

SEQ ID NO: 58211 - DNA, 20 bp, Artificial Sequence
  chemically synthesized
gtttgctgagaatgatggtt

SEQ ID NO: 58212 - DNA, 20 bp, Artificial Sequence
  chemically synthesized
cagtctatcattgatggaca

SEQ ID NO: 58213 - DNA, 20 bp, Artificial Sequence
  chemically synthesized
gtgcatgtgtctttatagca

SEQ ID NO: 58214 - DNA, 20 bp, Artificial Sequence
  chemically synthesized
ctgtcttccacaatggttga

SEQ ID NO: 58215 - DNA, 20 bp, Artificial Sequence
  chemically synthesized
tccacattccctccagcacc

SEQ ID NO: 58216 - DNA, 20 bp, Artificial Sequence
  chemically synthesized
ggtgtgagatggtatgtcat

SEQ ID NO: 58217 - DNA, 20 bp, Artificial Sequence
  chemically synthesized
gagatggtatgtcattgtgg

SEQ ID NO: 58218 - DNA, 20 bp, Artificial Sequence
  chemically synthesized
tcagagaaacgcaaatcaaa

SEQ ID NO: 58219 - DNA, 20 bp, Artificial Sequence
  chemically synthesized
acgcaaatcaaattgtgttt

SEQ ID NO: 58220 - DNA, 20 bp, Artificial Sequence
  chemically synthesized
cactaaatatgatattaact

SEQ ID NO: 58221 - DNA, 20 bp, Artificial Sequence
  chemically synthesized
ggcttttgtaaatgctcttt

SEQ ID NO: 58222 - DNA, 20 bp, Artificial Sequence
  chemically synthesized
ctttctatttcttatttgct

SEQ ID NO: 58223 - DNA, 20 bp, Artificial Sequence
  chemically synthesized
gatgcattcatgttattaaa

SEQ ID NO: 58224 - DNA, 20 bp, Artificial Sequence
  chemically synthesized
attaaattatgctttgaatg

SEQ ID NO: 58225 - DNA, 20 bp, Artificial Sequence
  chemically synthesized
aattatgctttgaatgcatt

SEQ ID NO: 58226 - DNA, 20 bp, Artificial Sequence
  chemically synthesized
tctgttaacatggcaaatta

SEQ ID NO: 58227 - DNA, 20 bp, Artificial Sequence
  chemically synthesized
gattaatttttgaatcttta

SEQ ID NO: 58228 - DNA, 20 bp, Artificial Sequence
  chemically synthesized
tttttgaatctttaacctgc

SEQ ID NO: 58229 - DNA, 20 bp, Artificial Sequence
  chemically synthesized
gtgtgttagtattttcttgt

SEQ ID NO: 58230 - DNA, 20 bp, Artificial Sequence
  chemically synthesized
gttagtattttcttgtgaaa

SEQ ID NO: 58231 - DNA, 20 bp, Artificial Sequence
  chemically synthesized
tcttttctctaatattttgg

SEQ ID NO: 58232 - DNA, 20 bp, Artificial Sequence
  chemically synthesized
attttggccaggtttgggta

SEQ ID NO: 58233 - DNA, 20 bp, Artificial Sequence
  chemically synthesized
ggtttgggtaccaggattaa

SEQ ID NO: 58234 - DNA, 20 bp, Artificial Sequence
  chemically synthesized
ttgagaagggtcattcctct

SEQ ID NO: 58235 - DNA, 20 bp, Artificial Sequence
  chemically synthesized
cagtttctaaaataatttgt

SEQ ID NO: 58236 - DNA, 20 bp, Artificial Sequence
  chemically synthesized
cagaatataaccatcaagca

SEQ ID NO: 58237 - DNA, 20 bp, Artificial Sequence
  chemically synthesized
gcatagagttttctttgggg

SEQ ID NO: 58238 - DNA, 20 bp, Artificial Sequence
  chemically synthesized
tggggggaagtttattgata

SEQ ID NO: 58239 - DNA, 20 bp, Artificial Sequence
  chemically synthesized
aatattccatttctatgtgg

SEQ ID NO: 58240 - DNA, 20 bp, Artificial Sequence
  chemically synthesized
tgtgggtcagatttactaat

SEQ ID NO: 58241 - DNA, 20 bp, Artificial Sequence
  chemically synthesized
agatattagtaatttatata

SEQ ID NO: 58242 - DNA, 20 bp, Artificial Sequence
  chemically synthesized
ctttttaatctaaacaaagt

SEQ ID NO: 58243 - DNA, 20 bp, Artificial Sequence
  chemically synthesized
tatcatagcagcagaaagcc

SEQ ID NO: 58244 - DNA, 20 bp, Artificial Sequence
  chemically synthesized
catcgagacaaagaaattct

SEQ ID NO: 58245 - DNA, 20 bp, Artificial Sequence
  chemically synthesized
gtaaatttttataataaatg

SEQ ID NO: 58246 - DNA, 20 bp, Artificial Sequence
  chemically synthesized
tcaaacccaggtgtgaaaga

SEQ ID NO: 58247 - DNA, 20 bp, Artificial Sequence
  chemically synthesized
catgaagtggctaactggag

SEQ ID NO: 58248 - DNA, 20 bp, Artificial Sequence
  chemically synthesized
aaatccccacaacattctga

SEQ ID NO: 58249 - DNA, 20 bp, Artificial Sequence
  chemically synthesized
tatatgccttctctattagt

SEQ ID NO: 58250 - DNA, 20 bp, Artificial Sequence
  chemically synthesized
gatagatagatcattgatag

SEQ ID NO: 58251 - DNA, 20 bp, Artificial Sequence
  chemically synthesized
tccgcagggcaagaaactca

SEQ ID NO: 58252 - DNA, 20 bp, Artificial Sequence
  chemically synthesized
gtattgtactcttgagacag

SEQ ID NO: 58253 - DNA, 20 bp, Artificial Sequence
  chemically synthesized
ggaaggcaatctactttact

SEQ ID NO: 58254 - DNA, 20 bp, Artificial Sequence
  chemically synthesized
aatctactttactcaaagtt

SEQ ID NO: 58255 - DNA, 20 bp, Artificial Sequence
  chemically synthesized
agaaagagtaagaaacctag

SEQ ID NO: 58256 - DNA, 20 bp, Artificial Sequence
  chemically synthesized
gaaacctagctcagctttgt

SEQ ID NO: 58257 - DNA, 20 bp, Artificial Sequence
  chemically synthesized
ctagctcagctttgtctcag

SEQ ID NO: 58258 - DNA, 20 bp, Artificial Sequence
  chemically synthesized
gtcctggttaggggaagaga

SEQ ID NO: 58259 - DNA, 20 bp, Artificial Sequence
  chemically synthesized
ttaatggaactaccatttaa

SEQ ID NO: 58260 - DNA, 20 bp, Artificial Sequence
  chemically synthesized
catttaagtgagtttaaact

SEQ ID NO: 58261 - DNA, 20 bp, Artificial Sequence
  chemically synthesized
agtgagtttaaactggatgc

SEQ ID NO: 58262 - DNA, 20 bp, Artificial Sequence
  chemically synthesized
ccacctgcaccctcacttcc

SEQ ID NO: 58263 - DNA, 20 bp, Artificial Sequence
  chemically synthesized
cttcccacttctcttagcag

SEQ ID NO: 58264 - DNA, 20 bp, Artificial Sequence
  chemically synthesized
tctcttagcagagtagattg

SEQ ID NO: 58265 - DNA, 20 bp, Artificial Sequence
  chemically synthesized
agagtagattgatatgatta

SEQ ID NO: 58266 - DNA, 20 bp, Artificial Sequence
  chemically synthesized
agaatctattccctctgaag

SEQ ID NO: 58267 - DNA, 20 bp, Artificial Sequence
  chemically synthesized
aatttgctcaaagaaatcat

SEQ ID NO: 58268 - DNA, 20 bp, Artificial Sequence
  chemically synthesized
gtgagcctcagaatcaaaga

SEQ ID NO: 58269 - DNA, 20 bp, Artificial Sequence
  chemically synthesized
tgtaattaacttctctgaaa

SEQ ID NO: 58270 - DNA, 20 bp, Artificial Sequence
  chemically synthesized
atatgctggtgataagtgac

SEQ ID NO: 58271 - DNA, 20 bp, Artificial Sequence
  chemically synthesized
ttaaaagatgggcacagggc

SEQ ID NO: 58272 - DNA, 20 bp, Artificial Sequence
  chemically synthesized
tctccacccactgcctttcc

SEQ ID NO: 58273 - DNA, 20 bp, Artificial Sequence
  chemically synthesized
taggaaatcaatacctttct

SEQ ID NO: 58274 - DNA, 20 bp, Artificial Sequence
  chemically synthesized
aataataccaatctccctcc

SEQ ID NO: 58275 - DNA, 20 bp, Artificial Sequence
  chemically synthesized
ttattacaagaataaagact

SEQ ID NO: 58276 - DNA, 20 bp, Artificial Sequence
  chemically synthesized
aagactcagagtttaaatac

SEQ ID NO: 58277 - DNA, 20 bp, Artificial Sequence
  chemically synthesized
atattcaaaaggcaaagtgg

SEQ ID NO: 58278 - DNA, 20 bp, Artificial Sequence
  chemically synthesized
catatgatatctcaaacacc

SEQ ID NO: 58279 - DNA, 20 bp, Artificial Sequence
  chemically synthesized
actcacatcagagtcaaaat

SEQ ID NO: 58280 - DNA, 20 bp, Artificial Sequence
  chemically synthesized
ggatgtttctaacctgcagc

SEQ ID NO: 58281 - DNA, 20 bp, Artificial Sequence
  chemically synthesized
agagaggctggagaatgcgg

SEQ ID NO: 58282 - DNA, 20 bp, Artificial Sequence
  chemically synthesized
atttaaacccaagaagaaga

SEQ ID NO: 58283 - DNA, 20 bp, Artificial Sequence
  chemically synthesized
cacttgcaaaagaagtatgt

SEQ ID NO: 58284 - DNA, 20 bp, Artificial Sequence
  chemically synthesized
gtaaaagttttaatgcacga

SEQ ID NO: 58285 - DNA, 20 bp, Artificial Sequence
  chemically synthesized
ttaataaaataaaaacttat

SEQ ID NO: 58286 - DNA, 20 bp, Artificial Sequence
  chemically synthesized
cccctgggagggcccaacaa

SEQ ID NO: 58287 - DNA, 20 bp, Artificial Sequence
  chemically synthesized
atgcatactcttctagctct

SEQ ID NO: 58288 - DNA, 20 bp, Artificial Sequence
  chemically synthesized
tgctctaattttggtcttca

SEQ ID NO: 58289 - DNA, 20 bp, Artificial Sequence
  chemically synthesized
attagtgagttggataacaa

SEQ ID NO: 58290 - DNA, 20 bp, Artificial Sequence
  chemically synthesized
gcaaatcaggcaaaatgtat

SEQ ID NO: 58291 - DNA, 20 bp, Artificial Sequence
  chemically synthesized
tcaccaagtcgtagccacat

SEQ ID NO: 58292 - DNA, 20 bp, Artificial Sequence
  chemically synthesized
tcgtagccacattctggctt

SEQ ID NO: 58293 - DNA, 20 bp, Artificial Sequence
  chemically synthesized
tgaggtaaagaaaagaggca

SEQ ID NO: 58294 - DNA, 20 bp, Artificial Sequence
  chemically synthesized
aaaagaggcataatgtttgc

SEQ ID NO: 58295 - DNA, 20 bp, Artificial Sequence
  chemically synthesized
aggcataatgtttgcctttg

SEQ ID NO: 58296 - DNA, 20 bp, Artificial Sequence
  chemically synthesized
tttattttaaagcccaaggt

SEQ ID NO: 58297 - DNA, 20 bp, Artificial Sequence
  chemically synthesized
aaggtctttgtttttgaagt

SEQ ID NO: 58298 - DNA, 20 bp, Artificial Sequence
  chemically synthesized
gagttacttagatgctctct

SEQ ID NO: 58299 - DNA, 20 bp, Artificial Sequence
  chemically synthesized
ttcatgatttgttgaggttg

SEQ ID NO: 58300 - DNA, 20 bp, Artificial Sequence
  chemically synthesized
agagtggagtgtaccaggtt

SEQ ID NO: 58301 - DNA, 20 bp, Artificial Sequence
  chemically synthesized
cctcagagatgaagaagaga

SEQ ID NO: 58302 - DNA, 20 bp, Artificial Sequence
  chemically synthesized
agtccttcttattcttgctg

SEQ ID NO: 58303 - DNA, 20 bp, Artificial Sequence
  chemically synthesized
tgctgtcctgttttttcagg

SEQ ID NO: 58304 - DNA, 20 bp, Artificial Sequence
  chemically synthesized
ttttttcaggccaagattgg

SEQ ID NO: 58305 - DNA, 20 bp, Artificial Sequence
  chemically synthesized
ttcaggccaagattggcctt

SEQ ID NO: 58306 - DNA, 20 bp, Artificial Sequence
  chemically synthesized
aagcaacttagtggagaaag

SEQ ID NO: 58307 - DNA, 20 bp, Artificial Sequence
  chemically synthesized
catctcagcctcccaagtac

SEQ ID NO: 58308 - DNA, 20 bp, Artificial Sequence
  chemically synthesized
tttttgtatttttgtagagc

SEQ ID NO: 58309 - DNA, 20 bp, Artificial Sequence
  chemically synthesized
cacctcagcctcccaaagtg

SEQ ID NO: 58310 - DNA, 20 bp, Artificial Sequence
  chemically synthesized
aagccaacacgccagccaaa

SEQ ID NO: 58311 - DNA, 20 bp, Artificial Sequence
  chemically synthesized
tataacaacaacaaaatacc

SEQ ID NO: 58312 - DNA, 20 bp, Artificial Sequence
  chemically synthesized
aaattagaaaaattatagcc

SEQ ID NO: 58313 - DNA, 20 bp, Artificial Sequence
  chemically synthesized
tcaaagctgtagaagaaaag

SEQ ID NO: 58314 - DNA, 20 bp, Artificial Sequence
  chemically synthesized
catgcaactacataaaaagt

SEQ ID NO: 58315 - DNA, 20 bp, Artificial Sequence
  chemically synthesized
tcaaaaatgcaaatttaaaa

SEQ ID NO: 58316 - DNA, 20 bp, Artificial Sequence
  chemically synthesized
tttatctgtcaaattgatag

SEQ ID NO: 58317 - DNA, 20 bp, Artificial Sequence
  chemically synthesized
aatggcgtctttctggagag

SEQ ID NO: 58318 - DNA, 20 bp, Artificial Sequence
  chemically synthesized
ctcacaacatcctttataag

SEQ ID NO: 58319 - DNA, 20 bp, Artificial Sequence
  chemically synthesized
aaatacgagacaacttcaga

SEQ ID NO: 58320 - DNA, 20 bp, Artificial Sequence
  chemically synthesized
gactaaaggaatcccaattg

SEQ ID NO: 58321 - DNA, 20 bp, Artificial Sequence
  chemically synthesized
aatcccaattgaaatgattt

SEQ ID NO: 58322 - DNA, 20 bp, Artificial Sequence
  chemically synthesized
gctccaaccggcagcaatgt

SEQ ID NO: 58323 - DNA, 20 bp, Artificial Sequence
  chemically synthesized
ccatccctgatcactatttt

SEQ ID NO: 58324 - DNA, 20 bp, Artificial Sequence
  chemically synthesized
gctcaggtaaggaatggtgg

SEQ ID NO: 58325 - DNA, 20 bp, Artificial Sequence
  chemically synthesized
gtagagtttttgttccctca

SEQ ID NO: 58326 - DNA, 20 bp, Artificial Sequence
  chemically synthesized
aagtgtgggagcaagtgaga

SEQ ID NO: 58327 - DNA, 20 bp, Artificial Sequence
  chemically synthesized
tccctctcatcatctcctgc

SEQ ID NO: 58328 - DNA, 20 bp, Artificial Sequence
  chemically synthesized
ttggtacctttgatgctaga

SEQ ID NO: 58329 - DNA, 20 bp, Artificial Sequence
  chemically synthesized
gaatgctcaccacaatctat

SEQ ID NO: 58330 - DNA, 20 bp, Artificial Sequence
  chemically synthesized
tcttactaaccatcagcatt

SEQ ID NO: 58331 - DNA, 20 bp, Artificial Sequence
  chemically synthesized
ccttcttcaactaataaaga

SEQ ID NO: 58332 - DNA, 20 bp, Artificial Sequence
  chemically synthesized
tgtgtgggatcacggacagt

SEQ ID NO: 58333 - DNA, 20 bp, Artificial Sequence
  chemically synthesized
tattgatgagaaaaccacaa

SEQ ID NO: 58334 - DNA, 20 bp, Artificial Sequence
  chemically synthesized
aaagtaagaattccgtaatg

SEQ ID NO: 58335 - DNA, 20 bp, Artificial Sequence
  chemically synthesized
attccgtaatgcaatgtttc

SEQ ID NO: 58336 - DNA, 20 bp, Artificial Sequence
  chemically synthesized
gactttaagcatataaattc

SEQ ID NO: 58337 - DNA, 20 bp, Artificial Sequence
  chemically synthesized
tatactaatccatgctaagg

SEQ ID NO: 58338 - DNA, 20 bp, Artificial Sequence
  chemically synthesized
ctaatccatgctaaggctat

SEQ ID NO: 58339 - DNA, 20 bp, Artificial Sequence
  chemically synthesized
tgtttgtttcatcataaaaa

SEQ ID NO: 58340 - DNA, 20 bp, Artificial Sequence
  chemically synthesized
tggcagaaggctacatatcc

SEQ ID NO: 58341 - DNA, 20 bp, Artificial Sequence
  chemically synthesized
gccttggtgttccttccctc

SEQ ID NO: 58342 - DNA, 20 bp, Artificial Sequence
  chemically synthesized
ttgtcatgtcttgttcacag

SEQ ID NO: 58343 - DNA, 20 bp, Artificial Sequence
  chemically synthesized
ccaagactagaaatctgttc

SEQ ID NO: 58344 - DNA, 20 bp, Artificial Sequence
  chemically synthesized
tcacttcatctatcaatgtt

SEQ ID NO: 58345 - DNA, 20 bp, Artificial Sequence
  chemically synthesized
tctatcaatgttctctgatt

SEQ ID NO: 58346 - DNA, 20 bp, Artificial Sequence
  chemically synthesized
tgtaagaaaccaagaaaagt

SEQ ID NO: 58347 - DNA, 20 bp, Artificial Sequence
  chemically synthesized
ccaagaaaagtgagtgtttt

SEQ ID NO: 58348 - DNA, 20 bp, Artificial Sequence
  chemically synthesized
gttgaacctcaccttttggt

SEQ ID NO: 58349 - DNA, 20 bp, Artificial Sequence
  chemically synthesized
tttctgtgcagaatttaaat

SEQ ID NO: 58350 - DNA, 20 bp, Artificial Sequence
  chemically synthesized
taaatgtgagtttcaatcct

SEQ ID NO: 58351 - DNA, 20 bp, Artificial Sequence
  chemically synthesized
tcctgaaagtttcctggact

SEQ ID NO: 58352 - DNA, 20 bp, Artificial Sequence
  chemically synthesized
ttcaagctagagatgaagtg

SEQ ID NO: 58353 - DNA, 20 bp, Artificial Sequence
  chemically synthesized
agtggaaggttttctgcaag

SEQ ID NO: 58354 - DNA, 20 bp, Artificial Sequence
  chemically synthesized
actagaagaatctgagaagc

SEQ ID NO: 58355 - DNA, 20 bp, Artificial Sequence
  chemically synthesized
aggatgtagtcatcactcca

SEQ ID NO: 58356 - DNA, 20 bp, Artificial Sequence
  chemically synthesized
atcactccagaaagctttgg

SEQ ID NO: 58357 - DNA, 20 bp, Artificial Sequence
  chemically synthesized
gcctcatgtgtaccaggacc

SEQ ID NO: 58358 - DNA, 20 bp, Artificial Sequence
  chemically synthesized
aagaagcatatgtcaccatg

SEQ ID NO: 58359 - DNA, 20 bp, Artificial Sequence
  chemically synthesized
gaacttaccgtgagcgacaa

SEQ ID NO: 58360 - DNA, 20 bp, Artificial Sequence
  chemically synthesized
aaaaccccactacacagtct

SEQ ID NO: 58361 - DNA, 20 bp, Artificial Sequence
  chemically synthesized
cagtctgcaagattctgaaa

SEQ ID NO: 58362 - DNA, 20 bp, Artificial Sequence
  chemically synthesized
ctcaacatgagtcaagagca

SEQ ID NO: 58363 - DNA, 20 bp, Artificial Sequence
  chemically synthesized
agagcatcctgcttctacca

SEQ ID NO: 58364 - DNA, 20 bp, Artificial Sequence
  chemically synthesized
ctaccatgtggatttggtca

SEQ ID NO: 58365 - DNA, 20 bp, Artificial Sequence
  chemically synthesized
tcacaaggtttaaggtgacc

SEQ ID NO: 58366 - DNA, 20 bp, Artificial Sequence
  chemically synthesized
aaagaatgaaagagtaaagg

SEQ ID NO: 58367 - DNA, 20 bp, Artificial Sequence
  chemically synthesized
aaaaatgatagttgccatta

SEQ ID NO: 58368 - DNA, 20 bp, Artificial Sequence
  chemically synthesized
attaggatttaatatatatc

SEQ ID NO: 58369 - DNA, 20 bp, Artificial Sequence
  chemically synthesized
taatttatgatccaaactga

SEQ ID NO: 58370 - DNA, 20 bp, Artificial Sequence
  chemically synthesized
agaaaaagccatgaagccca

SEQ ID NO: 58371 - DNA, 20 bp, Artificial Sequence
  chemically synthesized
aattagaaactcacaatttc

SEQ ID NO: 58372 - DNA, 20 bp, Artificial Sequence
  chemically synthesized
tctcttgtttgttaccaaga

SEQ ID NO: 58373 - DNA, 20 bp, Artificial Sequence
  chemically synthesized
gtcgctgaccctggacatgg

SEQ ID NO: 58374 - DNA, 20 bp, Artificial Sequence
  chemically synthesized
atacggaagagacgtattat

SEQ ID NO: 58375 - DNA, 20 bp, Artificial Sequence
  chemically synthesized
tagagaaggggtcataggtt

SEQ ID NO: 58376 - DNA, 20 bp, Artificial Sequence
  chemically synthesized
aaggggtcataggttcatgg

SEQ ID NO: 58377 - DNA, 20 bp, Artificial Sequence
  chemically synthesized
tcataggttcatggttttgt

SEQ ID NO: 58378 - DNA, 20 bp, Artificial Sequence
  chemically synthesized
ttttgtttgagatttgttgc

SEQ ID NO: 58379 - DNA, 20 bp, Artificial Sequence
  chemically synthesized
gagatttgttgctactgttt

SEQ ID NO: 58380 - DNA, 20 bp, Artificial Sequence
  chemically synthesized
gttttgaattttcttctttg

SEQ ID NO: 58381 - DNA, 20 bp, Artificial Sequence
  chemically synthesized
ttactttatttagggggact

SEQ ID NO: 58382 - DNA, 20 bp, Artificial Sequence
  chemically synthesized
ggactaggtgtttctgatat

SEQ ID NO: 58383 - DNA, 20 bp, Artificial Sequence
  chemically synthesized
tgtttctgatattttagttt

SEQ ID NO: 58384 - DNA, 20 bp, Artificial Sequence
  chemically synthesized
tctgatattttagttttctt

SEQ ID NO: 58385 - DNA, 20 bp, Artificial Sequence
  chemically synthesized
tattttagttttcttgtttg

SEQ ID NO: 58386 - DNA, 20 bp, Artificial Sequence
  chemically synthesized
tgttttgtgttgtctgtgaa

SEQ ID NO: 58387 - DNA, 20 bp, Artificial Sequence
  chemically synthesized
tggatgaatggaccttatct

SEQ ID NO: 58388 - DNA, 20 bp, Artificial Sequence
  chemically synthesized
gaccatcttattcttcaggt

SEQ ID NO: 58389 - DNA, 20 bp, Artificial Sequence
  chemically synthesized
aaatacaatgccataatccc

SEQ ID NO: 58390 - DNA, 20 bp, Artificial Sequence
  chemically synthesized
cataatcccttaggtttgcc

SEQ ID NO: 58391 - DNA, 20 bp, Artificial Sequence
  chemically synthesized
ttgcaaaacctaatgaaagt

SEQ ID NO: 58392 - DNA, 20 bp, Artificial Sequence
  chemically synthesized
tggaggaaaagtagaatctg

SEQ ID NO: 58393 - DNA, 20 bp, Artificial Sequence
  chemically synthesized
atatctccagctctaaaatc

SEQ ID NO: 58394 - DNA, 20 bp, Artificial Sequence
  chemically synthesized
tctaaaatcctttgtttcaa

SEQ ID NO: 58395 - DNA, 20 bp, Artificial Sequence
  chemically synthesized
taatcataactgctgttaat

SEQ ID NO: 58396 - DNA, 20 bp, Artificial Sequence
  chemically synthesized
acctagggacaatgtgtaat

SEQ ID NO: 58397 - DNA, 20 bp, Artificial Sequence
  chemically synthesized
ttggttctgcccaatctcct

SEQ ID NO: 58398 - DNA, 20 bp, Artificial Sequence
  chemically synthesized
gactgggtctagggcaccca

SEQ ID NO: 58399 - DNA, 20 bp, Artificial Sequence
  chemically synthesized
tagggcacccaggctgattc

SEQ ID NO: 58400 - DNA, 20 bp, Artificial Sequence
  chemically synthesized
gcctttgcctcttccttcaa

SEQ ID NO: 58401 - DNA, 20 bp, Artificial Sequence
  chemically synthesized
tcaatgtggtttccatggga

SEQ ID NO: 58402 - DNA, 20 bp, Artificial Sequence
  chemically synthesized
ggcagagctcctggaaatga

SEQ ID NO: 58403 - DNA, 20 bp, Artificial Sequence
  chemically synthesized
ggtggcatttttgtcagctc

SEQ ID NO: 58404 - DNA, 20 bp, Artificial Sequence
  chemically synthesized
ttgttcactacagtgaagat

SEQ ID NO: 58405 - DNA, 20 bp, Artificial Sequence
  chemically synthesized
gcattacaaacatttcgcag

SEQ ID NO: 58406 - DNA, 20 bp, Artificial Sequence
  chemically synthesized
agatggttattacatacatt

SEQ ID NO: 58407 - DNA, 20 bp, Artificial Sequence
  chemically synthesized
atatactaagcagctctgcg

SEQ ID NO: 58408 - DNA, 20 bp, Artificial Sequence
  chemically synthesized
gcacctctgaacagcccata

SEQ ID NO: 58409 - DNA, 20 bp, Artificial Sequence
  chemically synthesized
cctgggtgccctagacccag

SEQ ID NO: 58410 - DNA, 20 bp, Artificial Sequence
  chemically synthesized
atttcatgctatatagaact

SEQ ID NO: 58411 - DNA, 20 bp, Artificial Sequence
  chemically synthesized
atagaactggcagtttacac

SEQ ID NO: 58412 - DNA, 20 bp, Artificial Sequence
  chemically synthesized
taatacattgtctccgatca

SEQ ID NO: 58413 - DNA, 20 bp, Artificial Sequence
  chemically synthesized
ttttcctaataaaatctgaa

SEQ ID NO: 58414 - DNA, 20 bp, Artificial Sequence
  chemically synthesized
taatcaagaattaacagcag

SEQ ID NO: 58415 - DNA, 20 bp, Artificial Sequence
  chemically synthesized
aattaacagcagttatgatt

SEQ ID NO: 58416 - DNA, 20 bp, Artificial Sequence
  chemically synthesized
atgccaaacaacattgaaac

SEQ ID NO: 58417 - DNA, 20 bp, Artificial Sequence
  chemically synthesized
ttttagagctggagatatct

SEQ ID NO: 58418 - DNA, 20 bp, Artificial Sequence
  chemically synthesized
ggtcatctcttcatttcttc

SEQ ID NO: 58419 - DNA, 20 bp, Artificial Sequence
  chemically synthesized
atttacctgtcttcctgtgt

SEQ ID NO: 58420 - DNA, 20 bp, Artificial Sequence
  chemically synthesized
taaggtatcagagacctggc

SEQ ID NO: 58421 - DNA, 20 bp, Artificial Sequence
  chemically synthesized
cttctgctgcctacaaacca

SEQ ID NO: 58422 - DNA, 20 bp, Artificial Sequence
  chemically synthesized
cattttataatataataata

SEQ ID NO: 58423 - DNA, 20 bp, Artificial Sequence
  chemically synthesized
ttaccaagcagtcactttca

SEQ ID NO: 58424 - DNA, 20 bp, Artificial Sequence
  chemically synthesized
taggtcccctgtgcctaaca

SEQ ID NO: 58425 - DNA, 20 bp, Artificial Sequence
  chemically synthesized
aacagtatgattgacatgta

SEQ ID NO: 58426 - DNA, 20 bp, Artificial Sequence
  chemically synthesized
gcctatcaaggaggtggaag

SEQ ID NO: 58427 - DNA, 20 bp, Artificial Sequence
  chemically synthesized
ggtggaaggaatgcttatgg

SEQ ID NO: 58428 - DNA, 20 bp, Artificial Sequence
  chemically synthesized
caaaagcactaggcaaacct

SEQ ID NO: 58429 - DNA, 20 bp, Artificial Sequence
  chemically synthesized
catgaacctatgaccccttc

SEQ ID NO: 58430 - DNA, 20 bp, Artificial Sequence
  chemically synthesized
tttgtggttctgtgaacagc

SEQ ID NO: 58431 - DNA, 20 bp, Artificial Sequence
  chemically synthesized
ggtttggaggcctgtgggag

SEQ ID NO: 58432 - DNA, 20 bp, Artificial Sequence
  chemically synthesized
tacgtctcttccgtatatct

SEQ ID NO: 58433 - DNA, 20 bp, Artificial Sequence
  chemically synthesized
tacttgtaactctttctccc

SEQ ID NO: 58434 - DNA, 20 bp, Artificial Sequence
  chemically synthesized
tacccatgtccagggtcagc

SEQ ID NO: 58435 - DNA, 20 bp, Artificial Sequence
  chemically synthesized
ggtaacaaacaagagaaatt

SEQ ID NO: 58436 - DNA, 20 bp, Artificial Sequence
  chemically synthesized
tttcagaaaaatgaaaccaa

SEQ ID NO: 58437 - DNA, 20 bp, Artificial Sequence
  chemically synthesized
aaatgaaaccaaatgggctt

SEQ ID NO: 58438 - DNA, 20 bp, Artificial Sequence
  chemically synthesized
atgggacttcacacccgcaa

SEQ ID NO: 58439 - DNA, 20 bp, Artificial Sequence
  chemically synthesized
cacatttgtctggggacagt

SEQ ID NO: 58440 - DNA, 20 bp, Artificial Sequence
  chemically synthesized
agtttttgctcattgtcccg

SEQ ID NO: 58441 - DNA, 20 bp, Artificial Sequence
  chemically synthesized
ttgtcccggagggattatat

SEQ ID NO: 58442 - DNA, 20 bp, Artificial Sequence
  chemically synthesized
cctttcactttccaaactga

SEQ ID NO: 58443 - DNA, 20 bp, Artificial Sequence
  chemically synthesized
taggcacaccctgttactag

SEQ ID NO: 58444 - DNA, 20 bp, Artificial Sequence
  chemically synthesized
gtagtaattgcacacacctc

SEQ ID NO: 58445 - DNA, 20 bp, Artificial Sequence
  chemically synthesized
ctcaggaagagtggtcaaag

SEQ ID NO: 58446 - DNA, 20 bp, Artificial Sequence
  chemically synthesized
gaatcttgcagactgtgtag

SEQ ID NO: 58447 - DNA, 20 bp, Artificial Sequence
  chemically synthesized
tcgctcacggtaagttcagt

SEQ ID NO: 58448 - DNA, 20 bp, Artificial Sequence
  chemically synthesized
gtctgggtttcttacacttc

SEQ ID NO: 58449 - DNA, 20 bp, Artificial Sequence
  chemically synthesized
tagaagctggacatggtgac

SEQ ID NO: 58450 - DNA, 20 bp, Artificial Sequence
  chemically synthesized
acatggtgacatatgcttct

SEQ ID NO: 58451 - DNA, 20 bp, Artificial Sequence
  chemically synthesized
ctgagcaactgggttcaatg

SEQ ID NO: 58452 - DNA, 20 bp, Artificial Sequence
  chemically synthesized
actgggttcaatgtcaggat

SEQ ID NO: 58453 - DNA, 20 bp, Artificial Sequence
  chemically synthesized
agaaaatggagggggcagcg

SEQ ID NO: 58454 - DNA, 20 bp, Artificial Sequence
  chemically synthesized
tgtgagggatgaatctcttc

SEQ ID NO: 58455 - DNA, 20 bp, Artificial Sequence
  chemically synthesized
tctgcacatcccctccaagc

SEQ ID NO: 58456 - DNA, 20 bp, Artificial Sequence
  chemically synthesized
tcccctccaagcctctgctt

SEQ ID NO: 58457 - DNA, 20 bp, Artificial Sequence
  chemically synthesized
agaaaaccttccacttcatc

SEQ ID NO: 58458 - DNA, 20 bp, Artificial Sequence
  chemically synthesized
tctggcagtccaggaaactt

SEQ ID NO: 58459 - DNA, 20 bp, Artificial Sequence
  chemically synthesized
tcagttcaggagtaggtcta

SEQ ID NO: 58460 - DNA, 20 bp, Artificial Sequence
  chemically synthesized
agcatgttcctcaatggact

SEQ ID NO: 58461 - DNA, 20 bp, Artificial Sequence
  chemically synthesized
ctcaatggactctttgcttc

SEQ ID NO: 58462 - DNA, 20 bp, Artificial Sequence
  chemically synthesized
caccaaaaacactcactttt

SEQ ID NO: 58463 - DNA, 20 bp, Artificial Sequence
  chemically synthesized
cggggagactgggccatacg

SEQ ID NO: 58464 - DNA, 20 bp, Artificial Sequence
  chemically synthesized
actgagtcttcccacttatt

SEQ ID NO: 58465 - DNA, 20 bp, Artificial Sequence
  chemically synthesized
tctgagcttggaatcagaag

SEQ ID NO: 58466 - DNA, 20 bp, Artificial Sequence
  chemically synthesized
tgggtgaccatggtcaagag

SEQ ID NO: 58467 - DNA, 20 bp, Artificial Sequence
  chemically synthesized
gccctagagggaaggaacac

SEQ ID NO: 58468 - DNA, 20 bp, Artificial Sequence
  chemically synthesized
tatggaagtaaatttaaccc

SEQ ID NO: 58469 - DNA, 20 bp, Artificial Sequence
  chemically synthesized
attttcaaattacccaggga

SEQ ID NO: 58470 - DNA, 20 bp, Artificial Sequence
  chemically synthesized
tagtaagtaatttaacaagt

SEQ ID NO: 58471 - DNA, 20 bp, Artificial Sequence
  chemically synthesized
tgaaacaaacatagccttag

SEQ ID NO: 58472 - DNA, 20 bp, Artificial Sequence
  chemically synthesized
ataaaaaatcccatgaattt

SEQ ID NO: 58473 - DNA, 20 bp, Artificial Sequence
  chemically synthesized
attgtgcatttgccatgaat

SEQ ID NO: 58474 - DNA, 20 bp, Artificial Sequence
  chemically synthesized
cctttaggagatactggaag

SEQ ID NO: 58475 - DNA, 20 bp, Artificial Sequence
  chemically synthesized
cggaattcttactttgggga

SEQ ID NO: 58476 - DNA, 20 bp, Artificial Sequence
  chemically synthesized
tgaaatgccttaatcccctt

SEQ ID NO: 58477 - DNA, 20 bp, Artificial Sequence
  chemically synthesized
gtggttttctcatcaataaa

SEQ ID NO: 58478 - DNA, 20 bp, Artificial Sequence
  chemically synthesized
catctcccctggaaagcaag

SEQ ID NO: 58479 - DNA, 20 bp, Artificial Sequence
  chemically synthesized
gcagtgggggtagggtctca

SEQ ID NO: 58480 - DNA, 20 bp, Artificial Sequence
  chemically synthesized
cccacttattatttcctgaa

SEQ ID NO: 58481 - DNA, 20 bp, Artificial Sequence
  chemically synthesized
ttcagttaagagacatattt

SEQ ID NO: 58482 - DNA, 20 bp, Artificial Sequence
  chemically synthesized
acatatttgacagctttatg

SEQ ID NO: 58483 - DNA, 20 bp, Artificial Sequence
  chemically synthesized
tgacagctttatggagggat

SEQ ID NO: 58484 - DNA, 20 bp, Artificial Sequence
  chemically synthesized
tgcatacctgacaccaataa

SEQ ID NO: 58485 - DNA, 20 bp, Artificial Sequence
  chemically synthesized
ggttaactggacgtagtggg

SEQ ID NO: 58486 - DNA, 20 bp, Artificial Sequence
  chemically synthesized
ggattttgttcaaaatgtat

SEQ ID NO: 58487 - DNA, 20 bp, Artificial Sequence
  chemically synthesized
tggcagcttccaggaataca

SEQ ID NO: 58488 - DNA, 20 bp, Artificial Sequence
  chemically synthesized
gctaataaggaccccactcc

SEQ ID NO: 58489 - DNA, 20 bp, Artificial Sequence
  chemically synthesized
aagggtgtcctattttgcag

SEQ ID NO: 58490 - DNA, 20 bp, Artificial Sequence
  chemically synthesized
tctcatacattgctgccggt

SEQ ID NO: 58491 - DNA, 20 bp, Artificial Sequence
  chemically synthesized
ggagctttctctgcaggagt

SEQ ID NO: 58492 - DNA, 20 bp, Artificial Sequence
  chemically synthesized
aatctcccaaatcatttcaa

SEQ ID NO: 58493 - DNA, 20 bp, Artificial Sequence
  chemically synthesized
agcaaaattagggacagaat

SEQ ID NO: 58494 - DNA, 20 bp, Artificial Sequence
  chemically synthesized
caccacacagtgtattatct

SEQ ID NO: 58495 - DNA, 20 bp, Artificial Sequence
  chemically synthesized
atttatctattccatacttt

SEQ ID NO: 58496 - DNA, 20 bp, Artificial Sequence
  chemically synthesized
gctcatttttctattgtgat

SEQ ID NO: 58497 - DNA, 20 bp, Artificial Sequence
  chemically synthesized
tattgtgatatttgtttttt

SEQ ID NO: 58498 - DNA, 20 bp, Artificial Sequence
  chemically synthesized
aatgatactaaccatctatc

SEQ ID NO: 58499 - DNA, 20 bp, Artificial Sequence
  chemically synthesized
tcagctgtttatgtggcaat

SEQ ID NO: 58500 - DNA, 20 bp, Artificial Sequence
  chemically synthesized
gcttacttttaaatttgcat

SEQ ID NO: 58501 - DNA, 20 bp, Artificial Sequence
  chemically synthesized
tttaaatttgcatttttgat

SEQ ID NO: 58502 - DNA, 20 bp, Artificial Sequence
  chemically synthesized
ctcaatcctttcttttcttc

SEQ ID NO: 58503 - DNA, 20 bp, Artificial Sequence
  chemically synthesized
tttcttttcttctacagctt

SEQ ID NO: 58504 - DNA, 20 bp, Artificial Sequence
  chemically synthesized
ttagaatgttcttcttcatg

SEQ ID NO: 58505 - DNA, 20 bp, Artificial Sequence
  chemically synthesized
atttggctataatttttcta

SEQ ID NO: 58506 - DNA, 20 bp, Artificial Sequence
  chemically synthesized
tataatttttctaatttgtt

SEQ ID NO: 58507 - DNA, 20 bp, Artificial Sequence
  chemically synthesized
tatatgaaggtggctaggca

SEQ ID NO: 58508 - DNA, 20 bp, Artificial Sequence
  chemically synthesized
aaacaatttttggctggcgt

SEQ ID NO: 58509 - DNA, 20 bp, Artificial Sequence
  chemically synthesized
ttgggaggctgagatgggag

SEQ ID NO: 58510 - DNA, 20 bp, Artificial Sequence
  chemically synthesized
aatccttcctttctccacta

SEQ ID NO: 58511 - DNA, 20 bp, Artificial Sequence
  chemically synthesized
gtgagtagaaggagggagca

SEQ ID NO: 58512 - DNA, 20 bp, Artificial Sequence
  chemically synthesized
agagagcatctaagtaactc

SEQ ID NO: 58513 - DNA, 20 bp, Artificial Sequence
  chemically synthesized
ttacttcaaaaacaaagacc

SEQ ID NO: 58514 - DNA, 20 bp, Artificial Sequence
  chemically synthesized
cataagcagatatacatttt

SEQ ID NO: 58515 - DNA, 20 bp, Artificial Sequence
  chemically synthesized
tttttgaggcccctgaatac

SEQ ID NO: 58516 - DNA, 20 bp, Artificial Sequence
  chemically synthesized
gagtatgcatcagggaagat

SEQ ID NO: 58517 - DNA, 20 bp, Artificial Sequence
  chemically synthesized
gttttcatggggccaatatt

SEQ ID NO: 58518 - DNA, 20 bp, Artificial Sequence
  chemically synthesized
gggagattctttcagtagaa

SEQ ID NO: 58519 - DNA, 20 bp, Artificial Sequence
  chemically synthesized
caacaaaatagaaaacattc

SEQ ID NO: 58520 - DNA, 20 bp, Artificial Sequence
  chemically synthesized
agttgaactacataccgtcc

SEQ ID NO: 58521 - DNA, 20 bp, Artificial Sequence
  chemically synthesized
cactcaggtcaaaaggagcc

SEQ ID NO: 58522 - DNA, 20 bp, Artificial Sequence
  chemically synthesized
cagaaaaccatttcttcttc

SEQ ID NO: 58523 - DNA, 20 bp, Artificial Sequence
  chemically synthesized
gtgagtgagaaataaaccta

SEQ ID NO: 58524 - DNA, 20 bp, Artificial Sequence
  chemically synthesized
cctacggtgtttgagatatc

SEQ ID NO: 58525 - DNA, 20 bp, Artificial Sequence
  chemically synthesized
gtttgagatatcatatgttt

SEQ ID NO: 58526 - DNA, 20 bp, Artificial Sequence
  chemically synthesized
acacatgctaagctgttgga

SEQ ID NO: 58527 - DNA, 20 bp, Artificial Sequence
  chemically synthesized
agaacaaacccagagaaagg

SEQ ID NO: 58528 - DNA, 20 bp, Artificial Sequence
  chemically synthesized
cttccctgtcctggcctctt

SEQ ID NO: 58529 - DNA, 20 bp, Artificial Sequence
  chemically synthesized
ttcactcagtagagtgtgag

SEQ ID NO: 58530 - DNA, 20 bp, Artificial Sequence
  chemically synthesized
ataaaatgcagcccacatgg

SEQ ID NO: 58531 - DNA, 20 bp, Artificial Sequence
  chemically synthesized
acttattcgtagtggtgact

SEQ ID NO: 58532 - DNA, 20 bp, Artificial Sequence
  chemically synthesized
tagtggtgactgcctgtttc

SEQ ID NO: 58533 - DNA, 20 bp, Artificial Sequence
  chemically synthesized
tactgaaaaaaaagtaatga

SEQ ID NO: 58534 - DNA, 20 bp, Artificial Sequence
  chemically synthesized
cttggatgggttgtaaaagg

SEQ ID NO: 58535 - DNA, 20 bp, Artificial Sequence
  chemically synthesized
gaacacatctcctaagtact

SEQ ID NO: 58536 - DNA, 20 bp, Artificial Sequence
  chemically synthesized
catctcctaagtactgcatg

SEQ ID NO: 58537 - DNA, 20 bp, Artificial Sequence
  chemically synthesized
ttacattcaggcccctgtaa

SEQ ID NO: 58538 - DNA, 20 bp, Artificial Sequence
  chemically synthesized
aaagggatccaaatccagtt

SEQ ID NO: 58539 - DNA, 20 bp, Artificial Sequence
  chemically synthesized
ctgaggctcactcttcttca

SEQ ID NO: 58540 - DNA, 20 bp, Artificial Sequence
  chemically synthesized
ctcactcttcttcatttagc

SEQ ID NO: 58541 - DNA, 20 bp, Artificial Sequence
  chemically synthesized
gctggtcctcgtgccctctg

SEQ ID NO: 58542 - DNA, 20 bp, Artificial Sequence
  chemically synthesized
ggacagttttcctcaagctc

SEQ ID NO: 58543 - DNA, 20 bp, Artificial Sequence
  chemically synthesized
tcaagcaatacttcagaggg

SEQ ID NO: 58544 - DNA, 20 bp, Artificial Sequence
  chemically synthesized
ctaagagaagtgggaaggca

SEQ ID NO: 58545 - DNA, 20 bp, Artificial Sequence
  chemically synthesized
ttcagccttactgggttgga

SEQ ID NO: 58546 - DNA, 20 bp, Artificial Sequence
  chemically synthesized
ctggggctcaatcagaagca

SEQ ID NO: 58547 - DNA, 20 bp, Artificial Sequence
  chemically synthesized
catgcctccaccacctctct

SEQ ID NO: 58548 - DNA, 20 bp, Artificial Sequence
  chemically synthesized
ctctcttcctgcttgtccag

SEQ ID NO: 58549 - DNA, 20 bp, Artificial Sequence
  chemically synthesized
ttgccgttcggaggaggcat

SEQ ID NO: 58550 - DNA, 20 bp, Artificial Sequence
  chemically synthesized
tgcattgagcatgtgggata

SEQ ID NO: 58551 - DNA, 20 bp, Artificial Sequence
  chemically synthesized
ggaggctcttggtgtgttgt

SEQ ID NO: 58552 - DNA, 20 bp, Artificial Sequence
  chemically synthesized
gtgagtgcttatgtgcatgt

SEQ ID NO: 58553 - DNA, 20 bp, Artificial Sequence
  chemically synthesized
taagggcttgcatgctggtg

SEQ ID NO: 58554 - DNA, 20 bp, Artificial Sequence
  chemically synthesized
cccacactggtcatggccaa

SEQ ID NO: 58555 - DNA, 20 bp, Artificial Sequence
  chemically synthesized
taattgttcacacatggaac

SEQ ID NO: 58556 - DNA, 20 bp, Artificial Sequence
  chemically synthesized
aaaactgagacaaagctgag

SEQ ID NO: 58557 - DNA, 20 bp, Artificial Sequence
  chemically synthesized
aatcagtaaactttgagtaa

SEQ ID NO: 58558 - DNA, 20 bp, Artificial Sequence
  chemically synthesized
tcaagagtacaatacagaaa

SEQ ID NO: 58559 - DNA, 20 bp, Artificial Sequence
  chemically synthesized
gtacaatacagaaaatctgc

SEQ ID NO: 58560 - DNA, 20 bp, Artificial Sequence
  chemically synthesized
ctttcctgaatttctagcct

SEQ ID NO: 58561 - DNA, 20 bp, Artificial Sequence
  chemically synthesized
tctagcctactggcttgcct

SEQ ID NO: 58562 - DNA, 20 bp, Artificial Sequence
  chemically synthesized
ctggcttgccttatggattt

SEQ ID NO: 58563 - DNA, 20 bp, Artificial Sequence
  chemically synthesized
gatctatctatctatcctcc

SEQ ID NO: 58564 - DNA, 20 bp, Artificial Sequence
  chemically synthesized
ctgactaatagagaaggcat

SEQ ID NO: 58565 - DNA, 20 bp, Artificial Sequence
  chemically synthesized
taaacttactcagaatgttg

SEQ ID NO: 58566 - DNA, 20 bp, Artificial Sequence
  chemically synthesized
gctccagttagccacttcat

SEQ ID NO: 58567 - DNA, 20 bp, Artificial Sequence
  chemically synthesized
acaaacactatctttcacac

SEQ ID NO: 58568 - DNA, 20 bp, Artificial Sequence
  chemically synthesized
actgcaggaaagtataaatt

SEQ ID NO: 58569 - DNA, 20 bp, Artificial Sequence
  chemically synthesized
attagctattatctattgcc

SEQ ID NO: 58570 - DNA, 20 bp, Artificial Sequence
  chemically synthesized
acctacagaatgtccagaca

SEQ ID NO: 58571 - DNA, 20 bp, Artificial Sequence
  chemically synthesized
tctcgatgaaatatatctct

SEQ ID NO: 58572 - DNA, 20 bp, Artificial Sequence
  chemically synthesized
aggaataaaaaggggatatg

SEQ ID NO: 58573 - DNA, 20 bp, Artificial Sequence
  chemically synthesized
agtatcatatgcacattgat

SEQ ID NO: 58574 - DNA, 20 bp, Artificial Sequence
  chemically synthesized
gagataatgaattaaaatct

SEQ ID NO: 58575 - DNA, 20 bp, Artificial Sequence
  chemically synthesized
tctgctgctatgatacttag

SEQ ID NO: 58576 - DNA, 20 bp, Artificial Sequence
  chemically synthesized
tgatcactgaaaaacaaata

SEQ ID NO: 58577 - DNA, 20 bp, Artificial Sequence
  chemically synthesized
actgaaaaacaaatactttg

SEQ ID NO: 58578 - DNA, 20 bp, Artificial Sequence
  chemically synthesized
ctttgtttagattaaaaagt

SEQ ID NO: 58579 - DNA, 20 bp, Artificial Sequence
  chemically synthesized
gaaataagagctgtaaaaaa

SEQ ID NO: 58580 - DNA, 20 bp, Artificial Sequence
  chemically synthesized
atatacttgatgggtaacgt

SEQ ID NO: 58581 - DNA, 20 bp, Artificial Sequence
  chemically synthesized
taataacttagatgtaatga

SEQ ID NO: 58582 - DNA, 20 bp, Artificial Sequence
  chemically synthesized
acttccccccaaagaaaact

SEQ ID NO: 58583 - DNA, 20 bp, Artificial Sequence
  chemically synthesized
ttctcaacctattttttgaa

SEQ ID NO: 58584 - DNA, 20 bp, Artificial Sequence
  chemically synthesized
ctcaggaaaccaaagcaggt

SEQ ID NO: 58585 - DNA, 20 bp, Artificial Sequence
  chemically synthesized
gtgctgaaattgtgaacatg

SEQ ID NO: 58586 - DNA, 20 bp, Artificial Sequence
  chemically synthesized
tttctattcagtggtgtaca

SEQ ID NO: 58587 - DNA, 20 bp, Artificial Sequence
  chemically synthesized
aagagaaacaaataaacaca

SEQ ID NO: 58588 - DNA, 20 bp, Artificial Sequence
  chemically synthesized
acaaataaacacaatttgat

SEQ ID NO: 58589 - DNA, 20 bp, Artificial Sequence
  chemically synthesized
ctttgcccactttttgatgg

SEQ ID NO: 58590 - DNA, 20 bp, Artificial Sequence
  chemically synthesized
gcccactttttgatggggtt

SEQ ID NO: 58591 - DNA, 20 bp, Artificial Sequence
  chemically synthesized
tgtttgtttttttcttgtaa

SEQ ID NO: 58592 - DNA, 20 bp, Artificial Sequence
  chemically synthesized
gtaaatttgtttgagttcat

SEQ ID NO: 58593 - DNA, 20 bp, Artificial Sequence
  chemically synthesized
ctataaagacacatgcacat

SEQ ID NO: 58594 - DNA, 20 bp, Artificial Sequence
  chemically synthesized
caaatgtccatcaatgatag

SEQ ID NO: 58595 - DNA, 20 bp, Artificial Sequence
  chemically synthesized
ccatcaaaataaaaaaaaac

SEQ ID NO: 58596 - DNA, 20 bp, Artificial Sequence
  chemically synthesized
taacaaaaggacaaataact

SEQ ID NO: 58597 - DNA, 20 bp, Artificial Sequence
  chemically synthesized
accactttgaaaaactgttg

SEQ ID NO: 58598 - DNA, 20 bp, Artificial Sequence
  chemically synthesized
ggtttcttataaacttagat

SEQ ID NO: 58599 - DNA, 20 bp, Artificial Sequence
  chemically synthesized
atgacacagcaattccattc

SEQ ID NO: 58600 - DNA, 20 bp, Artificial Sequence
  chemically synthesized
aatgaaaatatatatacaca

SEQ ID NO: 58601 - DNA, 20 bp, Artificial Sequence
  chemically synthesized
aagggtaatagaattgagaa

SEQ ID NO: 58602 - DNA, 20 bp, Artificial Sequence
  chemically synthesized
ttatgattgctcctggggta

SEQ ID NO: 58603 - DNA, 20 bp, Artificial Sequence
  chemically synthesized
tgtgataaacacagttacca

SEQ ID NO: 58604 - DNA, 20 bp, Artificial Sequence
  chemically synthesized
accaatttgtttttcctatg

SEQ ID NO: 58605 - DNA, 20 bp, Artificial Sequence
  chemically synthesized
cagaagaaaagttcctctgg

SEQ ID NO: 58606 - DNA, 20 bp, Artificial Sequence
  chemically synthesized
ctttccattaaccgatgtaa

SEQ ID NO: 58607 - DNA, 20 bp, Artificial Sequence
  chemically synthesized
acctacaacccacaatgtgt

SEQ ID NO: 58608 - DNA, 20 bp, Artificial Sequence
  chemically synthesized
gactctgcacaaaaagagga

SEQ ID NO: 58609 - DNA, 20 bp, Artificial Sequence
  chemically synthesized
caaaaagaggaacctgtttg

SEQ ID NO: 58610 - DNA, 20 bp, Artificial Sequence
  chemically synthesized
ttaaatgcaggggagagtgc

SEQ ID NO: 58611 - DNA, 20 bp, Artificial Sequence
  chemically synthesized
ttgttacagaatctttcacc

SEQ ID NO: 58612 - DNA, 20 bp, Artificial Sequence
  chemically synthesized
gctcctacagtcatgaaaac

SEQ ID NO: 58613 - DNA, 20 bp, Artificial Sequence
  chemically synthesized
gttaattaactggctaaatg

SEQ ID NO: 58614 - DNA, 20 bp, Artificial Sequence
  chemically synthesized
taactgctatcttttagagt

SEQ ID NO: 58615 - DNA, 20 bp, Artificial Sequence
  chemically synthesized
tgctatcttttagagtgtgc

SEQ ID NO: 58616 - DNA, 20 bp, Artificial Sequence
  chemically synthesized
cttttagagtgtgcgattgt

SEQ ID NO: 58617 - DNA, 20 bp, Artificial Sequence
  chemically synthesized
tgtgttccttgttggggtag

SEQ ID NO: 58618 - DNA, 20 bp, Artificial Sequence
  chemically synthesized
agctagacagataccaggga

SEQ ID NO: 58619 - DNA, 20 bp, Artificial Sequence
  chemically synthesized
atctgaagatggtaatgttg

SEQ ID NO: 58620 - DNA, 20 bp, Artificial Sequence
  chemically synthesized
attacaggccccaacctgta

SEQ ID NO: 58621 - DNA, 20 bp, Artificial Sequence
  chemically synthesized
atggtattctcagctcattc

SEQ ID NO: 58622 - DNA, 20 bp, Artificial Sequence
  chemically synthesized
atacatatattttccactga

SEQ ID NO: 58623 - DNA, 20 bp, Artificial Sequence
  chemically synthesized
cccaaatagaggaggctctg

SEQ ID NO: 58624 - DNA, 20 bp, Artificial Sequence
  chemically synthesized
agagatatgttaaagggtaa

SEQ ID NO: 58625 - DNA, 20 bp, Artificial Sequence
  chemically synthesized
aagtgaacagaaaggtcaac

SEQ ID NO: 58626 - DNA, 20 bp, Artificial Sequence
  chemically synthesized
agtcaaacctccgtgtggga

SEQ ID NO: 58627 - DNA, 20 bp, Artificial Sequence
  chemically synthesized
tttgcccatgaaaatgagtg

SEQ ID NO: 58628 - DNA, 20 bp, Artificial Sequence
  chemically synthesized
ttgtttgaatgagttgttat

SEQ ID NO: 58629 - DNA, 20 bp, Artificial Sequence
  chemically synthesized
ttagtgcaatccatttccag

SEQ ID NO: 58630 - DNA, 20 bp, Artificial Sequence
  chemically synthesized
tacactactcaagtccaaca

SEQ ID NO: 58631 - DNA, 20 bp, Artificial Sequence
  chemically synthesized
aattgacaaaaactggaatt

SEQ ID NO: 58632 - DNA, 20 bp, Artificial Sequence
  chemically synthesized
gacaaaaactggaattcagg

SEQ ID NO: 58633 - DNA, 20 bp, Artificial Sequence
  chemically synthesized
cttctattactactggtgga

SEQ ID NO: 58634 - DNA, 20 bp, Artificial Sequence
  chemically synthesized
aggtcagaatttcaagctag

SEQ ID NO: 58635 - DNA, 20 bp, Artificial Sequence
  chemically synthesized
acaaaatgccaacttattcc

SEQ ID NO: 58636 - DNA, 20 bp, Artificial Sequence
  chemically synthesized
ttcacagaattataatttaa

SEQ ID NO: 58637 - DNA, 20 bp, Artificial Sequence
  chemically synthesized
attcactggccgactatttg

SEQ ID NO: 58638 - DNA, 20 bp, Artificial Sequence
  chemically synthesized
aaaactagtaagcactggta

SEQ ID NO: 58639 - DNA, 20 bp, Artificial Sequence
  chemically synthesized
ggtattgggattggaaacaa

SEQ ID NO: 58640 - DNA, 20 bp, Artificial Sequence
  chemically synthesized
ctcagatgcaacttgaagac

SEQ ID NO: 58641 - DNA, 20 bp, Artificial Sequence
  chemically synthesized
ggattgtctcgtgttgggca

SEQ ID NO: 58642 - DNA, 20 bp, Artificial Sequence
  chemically synthesized
tgagaagtgttgtaggagac

SEQ ID NO: 58643 - DNA, 20 bp, Artificial Sequence
  chemically synthesized
tctgaaagctgaaccgtgag

SEQ ID NO: 58644 - DNA, 20 bp, Artificial Sequence
  chemically synthesized
ccgtgagaggagatttgtat

SEQ ID NO: 58645 - DNA, 20 bp, Artificial Sequence
  chemically synthesized
agtgtttttggtgaaggaca

SEQ ID NO: 58646 - DNA, 20 bp, Artificial Sequence
  chemically synthesized
tccctcaccatatttcaaat

SEQ ID NO: 58647 - DNA, 20 bp, Artificial Sequence
  chemically synthesized
tgtggcagacatgaaatagt

SEQ ID NO: 58648 - DNA, 20 bp, Artificial Sequence
  chemically synthesized
cccaagggcaaagacaagaa

SEQ ID NO: 58649 - DNA, 20 bp, Artificial Sequence
  chemically synthesized
acaaaaacgctcaatgctaa

SEQ ID NO: 58650 - DNA, 20 bp, Artificial Sequence
  chemically synthesized
attcttttctgtatttaaac

SEQ ID NO: 58651 - DNA, 20 bp, Artificial Sequence
  chemically synthesized
tttttctgctacatttgtta

SEQ ID NO: 58652 - DNA, 20 bp, Artificial Sequence
  chemically synthesized
tagctatcttgcagtcagaa

SEQ ID NO: 58653 - DNA, 20 bp, Artificial Sequence
  chemically synthesized
ggcatcccaattaaaagtgg

SEQ ID NO: 58654 - DNA, 20 bp, Artificial Sequence
  chemically synthesized
taagctactgactgagacaa

SEQ ID NO: 58655 - DNA, 20 bp, Artificial Sequence
  chemically synthesized
aaaaattagatctggcagga

SEQ ID NO: 58656 - DNA, 20 bp, Artificial Sequence
  chemically synthesized
cttcctgtgaatgttgtaca

SEQ ID NO: 58657 - DNA, 20 bp, Artificial Sequence
  chemically synthesized
gtacatactgcttctgttct

SEQ ID NO: 58658 - DNA, 20 bp, Artificial Sequence
  chemically synthesized
cttctatagacgcagtatct

SEQ ID NO: 58659 - DNA, 20 bp, Artificial Sequence
  chemically synthesized
atgctggaagaaagtgggga

SEQ ID NO: 58660 - DNA, 20 bp, Artificial Sequence
  chemically synthesized
gtgatctgtcacacatagta

SEQ ID NO: 58661 - DNA, 20 bp, Artificial Sequence
  chemically synthesized
acatagtatttggtttctta

SEQ ID NO: 58662 - DNA, 20 bp, Artificial Sequence
  chemically synthesized
atgaaatctacattttgtat

SEQ ID NO: 58663 - DNA, 20 bp, Artificial Sequence
  chemically synthesized
gtgctcaagtgtgagcctag

SEQ ID NO: 58664 - DNA, 20 bp, Artificial Sequence
  chemically synthesized
gttcatcagtactagaaatt

SEQ ID NO: 58665 - DNA, 20 bp, Artificial Sequence
  chemically synthesized
tactagaaattagatgcttc

SEQ ID NO: 58666 - DNA, 20 bp, Artificial Sequence
  chemically synthesized
atatactaaaatcaaatccc

SEQ ID NO: 58667 - DNA, 20 bp, Artificial Sequence
  chemically synthesized
cactgctcacaaccacaggc

SEQ ID NO: 58668 - DNA, 20 bp, Artificial Sequence
  chemically synthesized
ccaccagcaaaagctcttta

SEQ ID NO: 58669 - DNA, 20 bp, Artificial Sequence
  chemically synthesized
cagcccactaattttgtaga

SEQ ID NO: 58670 - DNA, 20 bp, Artificial Sequence
  chemically synthesized
agatttcttccctgtgcagt

SEQ ID NO: 58671 - DNA, 20 bp, Artificial Sequence
  chemically synthesized
acacagaacatgtattatta

SEQ ID NO: 58672 - DNA, 20 bp, Artificial Sequence
  chemically synthesized
tggattcagacatcctgtgg

SEQ ID NO: 58673 - DNA, 20 bp, Artificial Sequence
  chemically synthesized
cctgtgggtcggctttgtct

SEQ ID NO: 58674 - DNA, 20 bp, Artificial Sequence
  chemically synthesized
tatacaatgagccatttata

SEQ ID NO: 58675 - DNA, 20 bp, Artificial Sequence
  chemically synthesized
gtttcctgcacctaaaatgg

SEQ ID NO: 58676 - DNA, 20 bp, Artificial Sequence
  chemically synthesized
tgtgttttaggaagcagctc

SEQ ID NO: 58677 - DNA, 20 bp, Artificial Sequence
  chemically synthesized
cagtagatattatggggcag

SEQ ID NO: 58678 - DNA, 20 bp, Artificial Sequence
  chemically synthesized
ggtgttagagctggacagat

SEQ ID NO: 58679 - DNA, 20 bp, Artificial Sequence
  chemically synthesized
tgaatggatatttacaaaga

SEQ ID NO: 58680 - DNA, 20 bp, Artificial Sequence
  chemically synthesized
agaggtagcttagaacacag

SEQ ID NO: 58681 - DNA, 20 bp, Artificial Sequence
  chemically synthesized
agaacacagtaaggatttaa

SEQ ID NO: 58682 - DNA, 20 bp, Artificial Sequence
  chemically synthesized
tgaaaatatacatgaaacat

SEQ ID NO: 58683 - DNA, 20 bp, Artificial Sequence
  chemically synthesized
aacatttgagcttctcttta

SEQ ID NO: 58684 - DNA, 20 bp, Artificial Sequence
  chemically synthesized
attgacggtgttataattac

SEQ ID NO: 58685 - DNA, 20 bp, Artificial Sequence
  chemically synthesized
actatggttttgaaattaca

SEQ ID NO: 58686 - DNA, 20 bp, Artificial Sequence
  chemically synthesized
tcttcctactgaatggagtt

SEQ ID NO: 58687 - DNA, 20 bp, Artificial Sequence
  chemically synthesized
agttagttgattaatagtgt

SEQ ID NO: 58688 - DNA, 20 bp, Artificial Sequence
  chemically synthesized
ttgattaatagtgtaaatga

SEQ ID NO: 58689 - DNA, 20 bp, Artificial Sequence
  chemically synthesized
ttaaaaagttggagtgaaaa

SEQ ID NO: 58690 - DNA, 20 bp, Artificial Sequence
  chemically synthesized
tatagatgacatgaaagaga

SEQ ID NO: 58691 - DNA, 20 bp, Artificial Sequence
  chemically synthesized
gacatgaaagagagtaagat

SEQ ID NO: 58692 - DNA, 20 bp, Artificial Sequence
  chemically synthesized
gtctttgtggaaatccaagg

SEQ ID NO: 58693 - DNA, 20 bp, Artificial Sequence
  chemically synthesized
ttcccttaatgagaaaattc

SEQ ID NO: 58694 - DNA, 20 bp, Artificial Sequence
  chemically synthesized
taagctgagtcattaggctg

SEQ ID NO: 58695 - DNA, 20 bp, Artificial Sequence
  chemically synthesized
tttgatattgtctatagcca

SEQ ID NO: 58696 - DNA, 20 bp, Artificial Sequence
  chemically synthesized
gtttttaactcttaaagaga

SEQ ID NO: 58697 - DNA, 20 bp, Artificial Sequence
  chemically synthesized
acatgcctcctgctgctgtt

SEQ ID NO: 58698 - DNA, 20 bp, Artificial Sequence
  chemically synthesized
gctgctgttagaagcttctg

SEQ ID NO: 58699 - DNA, 20 bp, Artificial Sequence
  chemically synthesized
ctagttttgttataattaca

SEQ ID NO: 58700 - DNA, 20 bp, Artificial Sequence
  chemically synthesized
tgtgtttatgtatgggcagg

SEQ ID NO: 58701 - DNA, 20 bp, Artificial Sequence
  chemically synthesized
gcagggttggcttctcggta

SEQ ID NO: 58702 - DNA, 20 bp, Artificial Sequence
  chemically synthesized
gatgtctactatattctagc

SEQ ID NO: 58703 - DNA, 20 bp, Artificial Sequence
  chemically synthesized
ctggtcactgaagacaaagc

SEQ ID NO: 58704 - DNA, 20 bp, Artificial Sequence
  chemically synthesized
acattaccttatcctgaaag

SEQ ID NO: 58705 - DNA, 20 bp, Artificial Sequence
  chemically synthesized
ttatcctgaaagttatgctt

SEQ ID NO: 58706 - DNA, 20 bp, Artificial Sequence
  chemically synthesized
aaaaagtcaaacaaaatgaa

SEQ ID NO: 58707 - DNA, 20 bp, Artificial Sequence
  chemically synthesized
ggagggagggaggaagacag

SEQ ID NO: 58708 - DNA, 20 bp, Artificial Sequence
  chemically synthesized
aagacagagaagcttagatc

SEQ ID NO: 58709 - DNA, 20 bp, Artificial Sequence
  chemically synthesized
gatctagggctttatactta

SEQ ID NO: 58710 - DNA, 20 bp, Artificial Sequence
  chemically synthesized
tgagagagatagagagagag

SEQ ID NO: 58711 - DNA, 20 bp, Artificial Sequence
  chemically synthesized
tcattctgagagagatagag

SEQ ID NO: 58712 - DNA, 20 bp, Artificial Sequence
  chemically synthesized
tacctagaattgtcattctg

SEQ ID NO: 58713 - DNA, 20 bp, Artificial Sequence
  chemically synthesized
aagtaaagaaaaaaccatgc

SEQ ID NO: 58714 - DNA, 20 bp, Artificial Sequence
  chemically synthesized
tccagaaacgacttgaagta

SEQ ID NO: 58715 - DNA, 20 bp, Artificial Sequence
  chemically synthesized
ctccagaaacgacttgaagt

SEQ ID NO: 58716 - DNA, 20 bp, Artificial Sequence
  chemically synthesized
agcatagccactttctccag

SEQ ID NO: 58717 - DNA, 20 bp, Artificial Sequence
  chemically synthesized
gagcatagccactttctcca

SEQ ID NO: 58718 - DNA, 20 bp, Artificial Sequence
  chemically synthesized
tgagcatagccactttctcc

SEQ ID NO: 58719 - DNA, 20 bp, Artificial Sequence
  chemically synthesized
gaaatgactcaccattttga

SEQ ID NO: 58720 - DNA, 20 bp, Artificial Sequence
  chemically synthesized
gggaactgaataacctgaaa

SEQ ID NO: 58721 - DNA, 20 bp, Artificial Sequence
  chemically synthesized
aaacccagtgcctgactcag

SEQ ID NO: 58722 - DNA, 20 bp, Artificial Sequence
  chemically synthesized
tcaaactgcattcaaaccca

SEQ ID NO: 58723 - DNA, 20 bp, Artificial Sequence
  chemically synthesized
aaaaaaatgactgaatatgt

SEQ ID NO: 58724 - DNA, 20 bp, Artificial Sequence
  chemically synthesized
aacattaaaaaaaatgactg

SEQ ID NO: 58725 - DNA, 20 bp, Artificial Sequence
  chemically synthesized
atcccctgccccctgtcatg

SEQ ID NO: 58726 - DNA, 20 bp, Artificial Sequence
  chemically synthesized
taaaccacccatagtattga

SEQ ID NO: 58727 - DNA, 20 bp, Artificial Sequence
  chemically synthesized
agaatactgaggtcttataa

SEQ ID NO: 58728 - DNA, 20 bp, Artificial Sequence
  chemically synthesized
ttgagaatactgaggtctta

SEQ ID NO: 58729 - DNA, 20 bp, Artificial Sequence
  chemically synthesized
cttcttgagaatactgaggt

SEQ ID NO: 58730 - DNA, 20 bp, Artificial Sequence
  chemically synthesized
ggagtgaaatgcattccttc

SEQ ID NO: 58731 - DNA, 20 bp, Artificial Sequence
  chemically synthesized
agatctacacttgggagtga

SEQ ID NO: 58732 - DNA, 20 bp, Artificial Sequence
  chemically synthesized
aagatctacacttgggagtg

SEQ ID NO: 58733 - DNA, 20 bp, Artificial Sequence
  chemically synthesized
aacatttaagatctacactt

SEQ ID NO: 58734 - DNA, 20 bp, Artificial Sequence
  chemically synthesized
taagagcagagtaatcattc

SEQ ID NO: 58735 - DNA, 20 bp, Artificial Sequence
  chemically synthesized
gtaagagcagagtaatcatt

SEQ ID NO: 58736 - DNA, 20 bp, Artificial Sequence
  chemically synthesized
tgtaagagcagagtaatcat

SEQ ID NO: 58737 - DNA, 20 bp, Artificial Sequence
  chemically synthesized
ttgtaagagcagagtaatca

SEQ ID NO: 58738 - DNA, 20 bp, Artificial Sequence
  chemically synthesized
tttttgtaagagcagagtaa

SEQ ID NO: 58739 - DNA, 20 bp, Artificial Sequence
  chemically synthesized
ctacaagtacagtcatagca

SEQ ID NO: 58740 - DNA, 20 bp, Artificial Sequence
  chemically synthesized
cctacaagtacagtcatagc

SEQ ID NO: 58741 - DNA, 20 bp, Artificial Sequence
  chemically synthesized
tcctacaagtacagtcatag

SEQ ID NO: 58742 - DNA, 20 bp, Artificial Sequence
  chemically synthesized
gacattttcctacaagtaca

SEQ ID NO: 58743 - DNA, 20 bp, Artificial Sequence
  chemically synthesized
ggacattttcctacaagtac

SEQ ID NO: 58744 - DNA, 20 bp, Artificial Sequence
  chemically synthesized
ctttggacattttcctacaa

SEQ ID NO: 58745 - DNA, 20 bp, Artificial Sequence
  chemically synthesized
atctcctgacaaggtaaaat

SEQ ID NO: 58746 - DNA, 20 bp, Artificial Sequence
  chemically synthesized
gatctcctgacaaggtaaaa

SEQ ID NO: 58747 - DNA, 20 bp, Artificial Sequence
  chemically synthesized
aaaagtcaaacaaaatgaat

SEQ ID NO: 58748 - DNA, 20 bp, Artificial Sequence
  chemically synthesized
ttaaaaagtcaaacaaaatg

SEQ ID NO: 58749 - DNA, 20 bp, Artificial Sequence
  chemically synthesized
cttaaaaagtcaaacaaaat

SEQ ID NO: 58750 - DNA, 20 bp, Artificial Sequence
  chemically synthesized
aggatttcttaaaaagtcaa

SEQ ID NO: 58751 - DNA, 20 bp, Artificial Sequence
  chemically synthesized
caggatttcttaaaaagtca

SEQ ID NO: 58752 - DNA, 20 bp, Artificial Sequence
  chemically synthesized
tgctttcaggatttcttaaa

SEQ ID NO: 58753 - DNA, 20 bp, Artificial Sequence
  chemically synthesized
tcctgaaagttatgctttca

SEQ ID NO: 58754 - DNA, 20 bp, Artificial Sequence
  chemically synthesized
ccttatcctgaaagttatgc

SEQ ID NO: 58755 - DNA, 20 bp, Artificial Sequence
  chemically synthesized
tgtacattaccttatcctga

SEQ ID NO: 58756 - DNA, 20 bp, Artificial Sequence
  chemically synthesized
cttctgtacattaccttatc

SEQ ID NO: 58757 - DNA, 20 bp, Artificial Sequence
  chemically synthesized
ggtgctgaggatatagcact

SEQ ID NO: 58758 - DNA, 20 bp, Artificial Sequence
  chemically synthesized
aggtgctgaggatatagcac

SEQ ID NO: 58759 - DNA, 20 bp, Artificial Sequence
  chemically synthesized
tagccactgatttaggtgct

SEQ ID NO: 58760 - DNA, 20 bp, Artificial Sequence
  chemically synthesized
gatgtctactatattctagc

SEQ ID NO: 58761 - DNA, 20 bp, Artificial Sequence
  chemically synthesized
ttggatgtctactatattct

SEQ ID NO: 58762 - DNA, 20 bp, Artificial Sequence
  chemically synthesized
aaaagttattggatgtctac

SEQ ID NO: 58763 - DNA, 20 bp, Artificial Sequence
  chemically synthesized
caaaagttattggatgtcta

SEQ ID NO: 58764 - DNA, 20 bp, Artificial Sequence
  chemically synthesized
aaaacactttcaaaagttat

SEQ ID NO: 58765 - DNA, 20 bp, Artificial Sequence
  chemically synthesized
gaaaacactttcaaaagtta

SEQ ID NO: 58766 - DNA, 20 bp, Artificial Sequence
  chemically synthesized
tgaaaacactttcaaaagtt

SEQ ID NO: 58767 - DNA, 20 bp, Artificial Sequence
  chemically synthesized
aaatctcacataaatctctc

SEQ ID NO: 58768 - DNA, 20 bp, Artificial Sequence
  chemically synthesized
cttaaaatctcacataaatc

SEQ ID NO: 58769 - DNA, 20 bp, Artificial Sequence
  chemically synthesized
acttaaaatctcacataaat

SEQ ID NO: 58770 - DNA, 20 bp, Artificial Sequence
  chemically synthesized
tttacttaaaatctcacata

SEQ ID NO: 58771 - DNA, 20 bp, Artificial Sequence
  chemically synthesized
tctagtcagttatttactta

SEQ ID NO: 58772 - DNA, 20 bp, Artificial Sequence
  chemically synthesized
ctctagtcagttatttactt

SEQ ID NO: 58773 - DNA, 20 bp, Artificial Sequence
  chemically synthesized
gatctttctctagtcagtta

SEQ ID NO: 58774 - DNA, 20 bp, Artificial Sequence
  chemically synthesized
agatctttctctagtcagtt

SEQ ID NO: 58775 - DNA, 20 bp, Artificial Sequence
  chemically synthesized
aatgagtaaactcatttaga

SEQ ID NO: 58776 - DNA, 20 bp, Artificial Sequence
  chemically synthesized
caatgagtaaactcatttag

SEQ ID NO: 58777 - DNA, 20 bp, Artificial Sequence
  chemically synthesized
agtgtatttcaatgagtaaa

SEQ ID NO: 58778 - DNA, 20 bp, Artificial Sequence
  chemically synthesized
gtgtggaggcaattcagtgt

SEQ ID NO: 58779 - DNA, 20 bp, Artificial Sequence
  chemically synthesized
ttggtgtggaggcaattcag

SEQ ID NO: 58780 - DNA, 20 bp, Artificial Sequence
  chemically synthesized
gttggtgtggaggcaattca

SEQ ID NO: 58781 - DNA, 20 bp, Artificial Sequence
  chemically synthesized
catatggccaatttgttggt

SEQ ID NO: 58782 - DNA, 20 bp, Artificial Sequence
  chemically synthesized
ttacatatggccaatttgtt

SEQ ID NO: 58783 - DNA, 20 bp, Artificial Sequence
  chemically synthesized
gatcccaaaaagaattatta

SEQ ID NO: 58784 - DNA, 20 bp, Artificial Sequence
  chemically synthesized
agatcccaaaaagaattatt

SEQ ID NO: 58785 - DNA, 20 bp, Artificial Sequence
  chemically synthesized
tagatcccaaaaagaattat

SEQ ID NO: 58786 - DNA, 20 bp, Artificial Sequence
  chemically synthesized
ttagatcccaaaaagaatta

SEQ ID NO: 58787 - DNA, 20 bp, Artificial Sequence
  chemically synthesized
tttagatcccaaaaagaatt

SEQ ID NO: 58788 - DNA, 20 bp, Artificial Sequence
  chemically synthesized
tcggtactaagttttttaga

SEQ ID NO: 58789 - DNA, 20 bp, Artificial Sequence
  chemically synthesized
gcttctcggtactaagtttt

SEQ ID NO: 58790 - DNA, 20 bp, Artificial Sequence
  chemically synthesized
tgtatgggcagggttggctt

SEQ ID NO: 58791 - DNA, 20 bp, Artificial Sequence
  chemically synthesized
atgtatgggcagggttggct

SEQ ID NO: 58792 - DNA, 20 bp, Artificial Sequence
  chemically synthesized
caatgtgtttatgtatgggc

SEQ ID NO: 58793 - DNA, 20 bp, Artificial Sequence
  chemically synthesized
taattacaatgtgtttatgt

SEQ ID NO: 58794 - DNA, 20 bp, Artificial Sequence
  chemically synthesized
ttataattacaatgtgttta

SEQ ID NO: 58795 - DNA, 20 bp, Artificial Sequence
  chemically synthesized
gttataattacaatgtgttt

SEQ ID NO: 58796 - DNA, 20 bp, Artificial Sequence
  chemically synthesized
tgttataattacaatgtgtt

SEQ ID NO: 58797 - DNA, 20 bp, Artificial Sequence
  chemically synthesized
tgcctagttttgttataatt

SEQ ID NO: 58798 - DNA, 20 bp, Artificial Sequence
  chemically synthesized
gaagcttctgcctagttttg

SEQ ID NO: 58799 - DNA, 20 bp, Artificial Sequence
  chemically synthesized
ccacatgcctcctgctgctg

SEQ ID NO: 58800 - DNA, 20 bp, Artificial Sequence
  chemically synthesized
atggtctaaattcccacatg

SEQ ID NO: 58801 - DNA, 20 bp, Artificial Sequence
  chemically synthesized
caggagcaagttgatggtct

SEQ ID NO: 58802 - DNA, 20 bp, Artificial Sequence
  chemically synthesized
gcaggagcaagttgatggtc

SEQ ID NO: 58803 - DNA, 20 bp, Artificial Sequence
  chemically synthesized
atttgcaggagcaagttgat

SEQ ID NO: 58804 - DNA, 20 bp, Artificial Sequence
  chemically synthesized
aagagaaagggcttaatttg

SEQ ID NO: 58805 - DNA, 20 bp, Artificial Sequence
  chemically synthesized
actcttaaagagaaagggct

SEQ ID NO: 58806 - DNA, 20 bp, Artificial Sequence
  chemically synthesized
aactcttaaagagaaagggc

SEQ ID NO: 58807 - DNA, 20 bp, Artificial Sequence
  chemically synthesized
taactcttaaagagaaaggg

SEQ ID NO: 58808 - DNA, 20 bp, Artificial Sequence
  chemically synthesized
ttaactcttaaagagaaagg

SEQ ID NO: 58809 - DNA, 20 bp, Artificial Sequence
  chemically synthesized
tctatagccaaatagttttt

SEQ ID NO: 58810 - DNA, 20 bp, Artificial Sequence
  chemically synthesized
atattgtctatagccaaata

SEQ ID NO: 58811 - DNA, 20 bp, Artificial Sequence
  chemically synthesized
gatattgtctatagccaaat

SEQ ID NO: 58812 - DNA, 20 bp, Artificial Sequence
  chemically synthesized
ggctgatgtgtttgatattg

SEQ ID NO: 58813 - DNA, 20 bp, Artificial Sequence
  chemically synthesized
catgactcaaaatgcataag

SEQ ID NO: 58814 - DNA, 20 bp, Artificial Sequence
  chemically synthesized
gtaattacatgactcaaaat

SEQ ID NO: 58815 - DNA, 20 bp, Artificial Sequence
  chemically synthesized
catccttcgtaattacatga

SEQ ID NO: 58816 - DNA, 20 bp, Artificial Sequence
  chemically synthesized
ccatccttcgtaattacatg

SEQ ID NO: 58817 - DNA, 20 bp, Artificial Sequence
  chemically synthesized
tagggatttccatccttcgt

SEQ ID NO: 58818 - DNA, 20 bp, Artificial Sequence
  chemically synthesized
atgagaaaattctagggatt

SEQ ID NO: 58819 - DNA, 20 bp, Artificial Sequence
  chemically synthesized
ccttaatgagaaaattctag

SEQ ID NO: 58820 - DNA, 20 bp, Artificial Sequence
  chemically synthesized
gcatagaataataatcatcc

SEQ ID NO: 58821 - DNA, 20 bp, Artificial Sequence
  chemically synthesized
agcatagaataataatcatc

SEQ ID NO: 58822 - DNA, 20 bp, Artificial Sequence
  chemically synthesized
tggaaatccaaggcaaagtt

SEQ ID NO: 58823 - DNA, 20 bp, Artificial Sequence
  chemically synthesized
gtggaaatccaaggcaaagt

SEQ ID NO: 58824 - DNA, 20 bp, Artificial Sequence
  chemically synthesized
ctgcctcccatcagtctttg

SEQ ID NO: 58825 - DNA, 20 bp, Artificial Sequence
  chemically synthesized
cctgcctcccatcagtcttt

SEQ ID NO: 58826 - DNA, 20 bp, Artificial Sequence
  chemically synthesized
tgtttcctgcctcccatcag

SEQ ID NO: 58827 - DNA, 20 bp, Artificial Sequence
  chemically synthesized
atgtttcctgcctcccatca

SEQ ID NO: 58828 - DNA, 20 bp, Artificial Sequence
  chemically synthesized
aaaatagtatgatcaccagg

SEQ ID NO: 58829 - DNA, 20 bp, Artificial Sequence
  chemically synthesized
aaaaatagtatgatcaccag

SEQ ID NO: 58830 - DNA, 20 bp, Artificial Sequence
  chemically synthesized
taaaaatagtatgatcacca

SEQ ID NO: 58831 - DNA, 20 bp, Artificial Sequence
  chemically synthesized
tatattttaaaaatagtatg

SEQ ID NO: 58832 - DNA, 20 bp, Artificial Sequence
  chemically synthesized
ttatatattttaaaaatagt

SEQ ID NO: 58833 - DNA, 20 bp, Artificial Sequence
  chemically synthesized
aactagcattcttatatatt

SEQ ID NO: 58834 - DNA, 20 bp, Artificial Sequence
  chemically synthesized
caactagcattcttatatat

SEQ ID NO: 58835 - DNA, 20 bp, Artificial Sequence
  chemically synthesized
gagtgaaaacccagctttca

SEQ ID NO: 58836 - DNA, 20 bp, Artificial Sequence
  chemically synthesized
aaaagttggagtgaaaaccc

SEQ ID NO: 58837 - DNA, 20 bp, Artificial Sequence
  chemically synthesized
taaaaaatctgaaacttaaa

SEQ ID NO: 58838 - DNA, 20 bp, Artificial Sequence
  chemically synthesized
tacatcttctaaaaaatctg

SEQ ID NO: 58839 - DNA, 20 bp, Artificial Sequence
  chemically synthesized
acgtaatcatgtgaataggg

SEQ ID NO: 58840 - DNA, 20 bp, Artificial Sequence
  chemically synthesized
gacgtaatcatgtgaatagg

SEQ ID NO: 58841 - DNA, 20 bp, Artificial Sequence
  chemically synthesized
tgacgtaatcatgtgaatag

SEQ ID NO: 58842 - DNA, 20 bp, Artificial Sequence
  chemically synthesized
ctataccccaaactgggaag

SEQ ID NO: 58843 - DNA, 20 bp, Artificial Sequence
  chemically synthesized
aacaagcagcaactgaatgt

SEQ ID NO: 58844 - DNA, 20 bp, Artificial Sequence
  chemically synthesized
caacaagcagcaactgaatg

SEQ ID NO: 58845 - DNA, 20 bp, Artificial Sequence
  chemically synthesized
acaactttcaacaagcagca

SEQ ID NO: 58846 - DNA, 20 bp, Artificial Sequence
  chemically synthesized
tgatgatcagaaaattgaca

SEQ ID NO: 58847 - DNA, 20 bp, Artificial Sequence
  chemically synthesized
atcatccttgtgatgatcag

SEQ ID NO: 58848 - DNA, 20 bp, Artificial Sequence
  chemically synthesized
tcttgatcatccttgtgatg

SEQ ID NO: 58849 - DNA, 20 bp, Artificial Sequence
  chemically synthesized
ttctcttgatcatccttgtg

SEQ ID NO: 58850 - DNA, 20 bp, Artificial Sequence
  chemically synthesized
cttctcttgatcatccttgt

SEQ ID NO: 58851 - DNA, 20 bp, Artificial Sequence
  chemically synthesized
aaaagtatccctttcttctc

SEQ ID NO: 58852 - DNA, 20 bp, Artificial Sequence
  chemically synthesized
aaaaagtatccctttcttct

SEQ ID NO: 58853 - DNA, 20 bp, Artificial Sequence
  chemically synthesized
taaaaagtatccctttcttc

SEQ ID NO: 58854 - DNA, 20 bp, Artificial Sequence
  chemically synthesized
ttaaaaagtatccctttctt

SEQ ID NO: 58855 - DNA, 20 bp, Artificial Sequence
  chemically synthesized
gatttttaaaaagtatccct

SEQ ID NO: 58856 - DNA, 20 bp, Artificial Sequence
  chemically synthesized
ggatttttaaaaagtatccc

SEQ ID NO: 58857 - DNA, 20 bp, Artificial Sequence
  chemically synthesized
atagtgtaaatgatttggat

SEQ ID NO: 58858 - DNA, 20 bp, Artificial Sequence
  chemically synthesized
attaatagtgtaaatgattt

SEQ ID NO: 58859 - DNA, 20 bp, Artificial Sequence
  chemically synthesized
gttgattaatagtgtaaatg

SEQ ID NO: 58860 - DNA, 20 bp, Artificial Sequence
  chemically synthesized
ctactgaatggagttagttg

SEQ ID NO: 58861 - DNA, 20 bp, Artificial Sequence
  chemically synthesized
ttcctactgaatggagttag

SEQ ID NO: 58862 - DNA, 20 bp, Artificial Sequence
  chemically synthesized
tgtggaatatgtatcatagg

SEQ ID NO: 58863 - DNA, 20 bp, Artificial Sequence
  chemically synthesized
aattgtgtggaatatgtatc

SEQ ID NO: 58864 - DNA, 20 bp, Artificial Sequence
  chemically synthesized
aaattgtgtggaatatgtat

SEQ ID NO: 58865 - DNA, 20 bp, Artificial Sequence
  chemically synthesized
tccataaaaatttaaattgt

SEQ ID NO: 58866 - DNA, 20 bp, Artificial Sequence
  chemically synthesized
atccataaaaatttaaattg

SEQ ID NO: 58867 - DNA, 20 bp, Artificial Sequence
  chemically synthesized
aataggtatctagacatatt

SEQ ID NO: 58868 - DNA, 20 bp, Artificial Sequence
  chemically synthesized
aaataggtatctagacatat

SEQ ID NO: 58869 - DNA, 20 bp, Artificial Sequence
  chemically synthesized
atatttaaataggtatctag

SEQ ID NO: 58870 - DNA, 20 bp, Artificial Sequence
  chemically synthesized
ttcatatttaaataggtatc

SEQ ID NO: 58871 - DNA, 20 bp, Artificial Sequence
  chemically synthesized
atattattcatatttaaata

SEQ ID NO: 58872 - DNA, 20 bp, Artificial Sequence
  chemically synthesized
aatgctcaataattaatatt

SEQ ID NO: 58873 - DNA, 20 bp, Artificial Sequence
  chemically synthesized
aaatgctcaataattaatat

SEQ ID NO: 58874 - DNA, 20 bp, Artificial Sequence
  chemically synthesized
tttaaatgctcaataattaa

SEQ ID NO: 58875 - DNA, 20 bp, Artificial Sequence
  chemically synthesized
ttctttaaatgctcaataat

SEQ ID NO: 58876 - DNA, 20 bp, Artificial Sequence
  chemically synthesized
atctattattctttaaatgc

SEQ ID NO: 58877 - DNA, 20 bp, Artificial Sequence
  chemically synthesized
aataatgagttaatctatta

SEQ ID NO: 58878 - DNA, 20 bp, Artificial Sequence
  chemically synthesized
gaataatgagttaatctatt

SEQ ID NO: 58879 - DNA, 20 bp, Artificial Sequence
  chemically synthesized
tgaataatgagttaatctat

SEQ ID NO: 58880 - DNA, 20 bp, Artificial Sequence
  chemically synthesized
catagagcttttgaataatg

SEQ ID NO: 58881 - DNA, 20 bp, Artificial Sequence
  chemically synthesized
aaattacatagagcttttga

SEQ ID NO: 58882 - DNA, 20 bp, Artificial Sequence
  chemically synthesized
gaaattacatagagcttttg

SEQ ID NO: 58883 - DNA, 20 bp, Artificial Sequence
  chemically synthesized
tgaaattacatagagctttt

SEQ ID NO: 58884 - DNA, 20 bp, Artificial Sequence
  chemically synthesized
ctatggttttgaaattacat

SEQ ID NO: 58885 - DNA, 20 bp, Artificial Sequence
  chemically synthesized
taattactatggttttgaaa

SEQ ID NO: 58886 - DNA, 20 bp, Artificial Sequence
  chemically synthesized
acggtgttataattactatg

SEQ ID NO: 58887 - DNA, 20 bp, Artificial Sequence
  chemically synthesized
tgtcaattgacggtgttata

SEQ ID NO: 58888 - DNA, 20 bp, Artificial Sequence
  chemically synthesized
atgtcaattgacggtgttat

SEQ ID NO: 58889 - DNA, 20 bp, Artificial Sequence
  chemically synthesized
aaaagtttatgtcaattgac

SEQ ID NO: 58890 - DNA, 20 bp, Artificial Sequence
  chemically synthesized
aaaaagtttatgtcaattga

SEQ ID NO: 58891 - DNA, 20 bp, Artificial Sequence
  chemically synthesized
tctttaaaaagtttatgtca

SEQ ID NO: 58892 - DNA, 20 bp, Artificial Sequence
  chemically synthesized
agcttctctttaaaaagttt

SEQ ID NO: 58893 - DNA, 20 bp, Artificial Sequence
  chemically synthesized
gagcttctctttaaaaagtt

SEQ ID NO: 58894 - DNA, 20 bp, Artificial Sequence
  chemically synthesized
tgaaaatatacatgaaacat

SEQ ID NO: 58895 - DNA, 20 bp, Artificial Sequence
  chemically synthesized
taattctgaaaatatacatg

SEQ ID NO: 58896 - DNA, 20 bp, Artificial Sequence
  chemically synthesized
tgagaaataagtaatgaaaa

SEQ ID NO: 58897 - DNA, 20 bp, Artificial Sequence
  chemically synthesized
ctgagaaataagtaatgaaa

SEQ ID NO: 58898 - DNA, 20 bp, Artificial Sequence
  chemically synthesized
tctgagaaataagtaatgaa

SEQ ID NO: 58899 - DNA, 20 bp, Artificial Sequence
  chemically synthesized
gctatgagtataatattttc

SEQ ID NO: 58900 - DNA, 20 bp, Artificial Sequence
  chemically synthesized
atagggattagctatgagta

SEQ ID NO: 58901 - DNA, 20 bp, Artificial Sequence
  chemically synthesized
aatagggattagctatgagt

SEQ ID NO: 58902 - DNA, 20 bp, Artificial Sequence
  chemically synthesized
gaacacagtaaggatttaat

SEQ ID NO: 58903 - DNA, 20 bp, Artificial Sequence
  chemically synthesized
caaagaggtagcttagaaca

SEQ ID NO: 58904 - DNA, 20 bp, Artificial Sequence
  chemically synthesized
acaaagaggtagcttagaac

SEQ ID NO: 58905 - DNA, 20 bp, Artificial Sequence
  chemically synthesized
taatatgtaaactcgtgcta

SEQ ID NO: 58906 - DNA, 20 bp, Artificial Sequence
  chemically synthesized
tctaagacatgtgttctaat

SEQ ID NO: 58907 - DNA, 20 bp, Artificial Sequence
  chemically synthesized
tggatactctacctgtggtc

SEQ ID NO: 58908 - DNA, 20 bp, Artificial Sequence
  chemically synthesized
aattctggatactctacctg

SEQ ID NO: 58909 - DNA, 20 bp, Artificial Sequence
  chemically synthesized
aaattctggatactctacct

SEQ ID NO: 58910 - DNA, 20 bp, Artificial Sequence
  chemically synthesized
gagctggacagatgtgcgtt

SEQ ID NO: 58911 - DNA, 20 bp, Artificial Sequence
  chemically synthesized
agacctgtggtgttagagct

SEQ ID NO: 58912 - DNA, 20 bp, Artificial Sequence
  chemically synthesized
atgtacacagtggttaagac

SEQ ID NO: 58913 - DNA, 20 bp, Artificial Sequence
  chemically synthesized
gctaagagtagttaatgtac

SEQ ID NO: 58914 - DNA, 20 bp, Artificial Sequence
  chemically synthesized
ttggctaagagtagttaatg

SEQ ID NO: 58915 - DNA, 20 bp, Artificial Sequence
  chemically synthesized
tacatgacgtgagctgaaaa

SEQ ID NO: 58916 - DNA, 20 bp, Artificial Sequence
  chemically synthesized
caaaaagaatattctacatg

SEQ ID NO: 58917 - DNA, 20 bp, Artificial Sequence
  chemically synthesized
acaaaaagaatattctacat

SEQ ID NO: 58918 - DNA, 20 bp, Artificial Sequence
  chemically synthesized
tacaaaaagaatattctaca

SEQ ID NO: 58919 - DNA, 20 bp, Artificial Sequence
  chemically synthesized
taaaatgtgatggcatttta

SEQ ID NO: 58920 - DNA, 20 bp, Artificial Sequence
  chemically synthesized
aatgacttataaaatgtgat

SEQ ID NO: 58921 - DNA, 20 bp, Artificial Sequence
  chemically synthesized
ccttcaatgacttataaaat

SEQ ID NO: 58922 - DNA, 20 bp, Artificial Sequence
  chemically synthesized
taaccaagaaaaattccctt

SEQ ID NO: 58923 - DNA, 20 bp, Artificial Sequence
  chemically synthesized
gtaaccaagaaaaattccct

SEQ ID NO: 58924 - DNA, 20 bp, Artificial Sequence
  chemically synthesized
ctttgtaaccaagaaaaatt

SEQ ID NO: 58925 - DNA, 20 bp, Artificial Sequence
  chemically synthesized
tggggcagagttgctttgta

SEQ ID NO: 58926 - DNA, 20 bp, Artificial Sequence
  chemically synthesized
agtagatattatggggcaga

SEQ ID NO: 58927 - DNA, 20 bp, Artificial Sequence
  chemically synthesized
cagtagatattatggggcag

SEQ ID NO: 58928 - DNA, 20 bp, Artificial Sequence
  chemically synthesized
tcagtagatattatggggca

SEQ ID NO: 58929 - DNA, 20 bp, Artificial Sequence
  chemically synthesized
ggaagcagctcactggcttt

SEQ ID NO: 58930 - DNA, 20 bp, Artificial Sequence
  chemically synthesized
aggaagcagctcactggctt

SEQ ID NO: 58931 - DNA, 20 bp, Artificial Sequence
  chemically synthesized
taggaagcagctcactggct

SEQ ID NO: 58932 - DNA, 20 bp, Artificial Sequence
  chemically synthesized
ctgcacctaaaatggctgtg

SEQ ID NO: 58933 - DNA, 20 bp, Artificial Sequence
  chemically synthesized
cctgcacctaaaatggctgt

SEQ ID NO: 58934 - DNA, 20 bp, Artificial Sequence
  chemically synthesized
tacactgtttcctgcaccta

SEQ ID NO: 58935 - DNA, 20 bp, Artificial Sequence
  chemically synthesized
atacactgtttcctgcacct

SEQ ID NO: 58936 - DNA, 20 bp, Artificial Sequence
  chemically synthesized
aatagagacagcacactcta

SEQ ID NO: 58937 - DNA, 20 bp, Artificial Sequence
  chemically synthesized
ttcaatagagacagcacact

SEQ ID NO: 58938 - DNA, 20 bp, Artificial Sequence
  chemically synthesized
acgattcttcaatagagaca

SEQ ID NO: 58939 - DNA, 20 bp, Artificial Sequence
  chemically synthesized
tcttcacgattcttcaatag

SEQ ID NO: 58940 - DNA, 20 bp, Artificial Sequence
  chemically synthesized
gtcttcacgattcttcaata

SEQ ID NO: 58941 - DNA, 20 bp, Artificial Sequence
  chemically synthesized
agacatcctgtgggtcggct

SEQ ID NO: 58942 - DNA, 20 bp, Artificial Sequence
  chemically synthesized
gattcagacatcctgtgggt

SEQ ID NO: 58943 - DNA, 20 bp, Artificial Sequence
  chemically synthesized
ggattcagacatcctgtggg

SEQ ID NO: 58944 - DNA, 20 bp, Artificial Sequence
  chemically synthesized
tttggattcagacatcctgt

SEQ ID NO: 58945 - DNA, 20 bp, Artificial Sequence
  chemically synthesized
ttatttggattcagacatcc

SEQ ID NO: 58946 - DNA, 20 bp, Artificial Sequence
  chemically synthesized
tatacacagaacatgtatta

SEQ ID NO: 58947 - DNA, 20 bp, Artificial Sequence
  chemically synthesized
caccaattctatacacagaa

SEQ ID NO: 58948 - DNA, 20 bp, Artificial Sequence
  chemically synthesized
tcttccaccaattctataca

SEQ ID NO: 58949 - DNA, 20 bp, Artificial Sequence
  chemically synthesized
ctcttccaccaattctatac

SEQ ID NO: 58950 - DNA, 20 bp, Artificial Sequence
  chemically synthesized
tctcttccaccaattctata

SEQ ID NO: 58951 - DNA, 20 bp, Artificial Sequence
  chemically synthesized
catggcagtcctcacactgt

SEQ ID NO: 58952 - DNA, 20 bp, Artificial Sequence
  chemically synthesized
tgaccttacatggcagtcct

SEQ ID NO: 58953 - DNA, 20 bp, Artificial Sequence
  chemically synthesized
taaatgcagtggttctgacc

SEQ ID NO: 58954 - DNA, 20 bp, Artificial Sequence
  chemically synthesized
ctaaatgcagtggttctgac

SEQ ID NO: 58955 - DNA, 20 bp, Artificial Sequence
  chemically synthesized
cctgtgcagtggtagctttc

SEQ ID NO: 58956 - DNA, 20 bp, Artificial Sequence
  chemically synthesized
ttccctgtgcagtggtagct

SEQ ID NO: 58957 - DNA, 20 bp, Artificial Sequence
  chemically synthesized
cttccctgtgcagtggtagc

SEQ ID NO: 58958 - DNA, 20 bp, Artificial Sequence
  chemically synthesized
gatttcttccctgtgcagtg

SEQ ID NO: 58959 - DNA, 20 bp, Artificial Sequence
  chemically synthesized
tagacttagatttcttccct

SEQ ID NO: 58960 - DNA, 20 bp, Artificial Sequence
  chemically synthesized
gtagacttagatttcttccc

SEQ ID NO: 58961 - DNA, 20 bp, Artificial Sequence
  chemically synthesized
tgtagacttagatttcttcc

SEQ ID NO: 58962 - DNA, 20 bp, Artificial Sequence
  chemically synthesized
tgatgacagcacgaaataat

SEQ ID NO: 58963 - DNA, 20 bp, Artificial Sequence
  chemically synthesized
agcagggtatggccctcctt

SEQ ID NO: 58964 - DNA, 20 bp, Artificial Sequence
  chemically synthesized
cagcagggtatggccctcct

SEQ ID NO: 58965 - DNA, 20 bp, Artificial Sequence
  chemically synthesized
tgtagtttcagcagggtatg

SEQ ID NO: 58966 - DNA, 20 bp, Artificial Sequence
  chemically synthesized
atgtagtttcagcagggtat

SEQ ID NO: 58967 - DNA, 20 bp, Artificial Sequence
  chemically synthesized
tgccaccagcaaaagctctt

SEQ ID NO: 58968 - DNA, 20 bp, Artificial Sequence
  chemically synthesized
acagttctgccaccagcaaa

SEQ ID NO: 58969 - DNA, 20 bp, Artificial Sequence
  chemically synthesized
ccagaatccatccagttcac

SEQ ID NO: 58970 - DNA, 20 bp, Artificial Sequence
  chemically synthesized
tggccattcccagaatccat

SEQ ID NO: 58971 - DNA, 20 bp, Artificial Sequence
  chemically synthesized
ctggccattcccagaatcca

SEQ ID NO: 58972 - DNA, 20 bp, Artificial Sequence
  chemically synthesized
tctggccattcccagaatcc

SEQ ID NO: 58973 - DNA, 20 bp, Artificial Sequence
  chemically synthesized
ttctggccattcccagaatc

SEQ ID NO: 58974 - DNA, 20 bp, Artificial Sequence
  chemically synthesized
tttttctggccattcccaga

SEQ ID NO: 58975 - DNA, 20 bp, Artificial Sequence
  chemically synthesized
gtttttctggccattcccag

SEQ ID NO: 58976 - DNA, 20 bp, Artificial Sequence
  chemically synthesized
agtcaaagcaacaaatctca

SEQ ID NO: 58977 - DNA, 20 bp, Artificial Sequence
  chemically synthesized
gttcagtcaaagcaacaaat

SEQ ID NO: 58978 - DNA, 20 bp, Artificial Sequence
  chemically synthesized
aatgacaggttggttcagtc

SEQ ID NO: 58979 - DNA, 20 bp, Artificial Sequence
  chemically synthesized
ataaagctgactgtgaatgg

SEQ ID NO: 58980 - DNA, 20 bp, Artificial Sequence
  chemically synthesized
aataactcagtagggaaaat

SEQ ID NO: 58981 - DNA, 20 bp, Artificial Sequence
  chemically synthesized
cttaaataactcagtaggga

SEQ ID NO: 58982 - DNA, 20 bp, Artificial Sequence
  chemically synthesized
acttaaataactcagtaggg

SEQ ID NO: 58983 - DNA, 20 bp, Artificial Sequence
  chemically synthesized
tttacttaaataactcagta

SEQ ID NO: 58984 - DNA, 20 bp, Artificial Sequence
  chemically synthesized
ctttacttaaataactcagt

SEQ ID NO: 58985 - DNA, 20 bp, Artificial Sequence
  chemically synthesized
tcccagagaccaagggctgt

SEQ ID NO: 58986 - DNA, 20 bp, Artificial Sequence
  chemically synthesized
attgtcccagagaccaaggg

SEQ ID NO: 58987 - DNA, 20 bp, Artificial Sequence
  chemically synthesized
cactggagacagaatatact

SEQ ID NO: 58988 - DNA, 20 bp, Artificial Sequence
  chemically synthesized
acactggagacagaatatac

SEQ ID NO: 58989 - DNA, 20 bp, Artificial Sequence
  chemically synthesized
caaggctttacactggagac

SEQ ID NO: 58990 - DNA, 20 bp, Artificial Sequence
  chemically synthesized
gatgcttccaaggctttaca

SEQ ID NO: 58991 - DNA, 20 bp, Artificial Sequence
  chemically synthesized
atcagtactagaaattagat

SEQ ID NO: 58992 - DNA, 20 bp, Artificial Sequence
  chemically synthesized
gttcatcagtactagaaatt

SEQ ID NO: 58993 - DNA, 20 bp, Artificial Sequence
  chemically synthesized
ggttcatcagtactagaaat

SEQ ID NO: 58994 - DNA, 20 bp, Artificial Sequence
  chemically synthesized
tggttcatcagtactagaaa

SEQ ID NO: 58995 - DNA, 20 bp, Artificial Sequence
  chemically synthesized
ttggttcatcagtactagaa

SEQ ID NO: 58996 - DNA, 20 bp, Artificial Sequence
  chemically synthesized
catgtatttttggttcatca

SEQ ID NO: 58997 - DNA, 20 bp, Artificial Sequence
  chemically synthesized
tcagagtgctcaagtgtgag

SEQ ID NO: 58998 - DNA, 20 bp, Artificial Sequence
  chemically synthesized
catgatagaaagtgaggctg

SEQ ID NO: 58999 - DNA, 20 bp, Artificial Sequence
  chemically synthesized
acatgatagaaagtgaggct

SEQ ID NO: 59000 - DNA, 20 bp, Artificial Sequence
  chemically synthesized
tacatgatagaaagtgaggc

SEQ ID NO: 59001 - DNA, 20 bp, Artificial Sequence
  chemically synthesized
tatgtatgttttacatgata

SEQ ID NO: 59002 - DNA, 20 bp, Artificial Sequence
  chemically synthesized
gtatgtatgttttacatgat

SEQ ID NO: 59003 - DNA, 20 bp, Artificial Sequence
  chemically synthesized
tgtatgtatgttttacatga

SEQ ID NO: 59004 - DNA, 20 bp, Artificial Sequence
  chemically synthesized
tagaccctataatgaaatct

SEQ ID NO: 59005 - DNA, 20 bp, Artificial Sequence
  chemically synthesized
gtagaccctataatgaaatc

SEQ ID NO: 59006 - DNA, 20 bp, Artificial Sequence
  chemically synthesized
tgtagaccctataatgaaat

SEQ ID NO: 59007 - DNA, 20 bp, Artificial Sequence
  chemically synthesized
agctgttttgtagaccctat

SEQ ID NO: 59008 - DNA, 20 bp, Artificial Sequence
  chemically synthesized
ttaagctgttttgtagaccc

SEQ ID NO: 59009 - DNA, 20 bp, Artificial Sequence
  chemically synthesized
cttaagctgttttgtagacc

SEQ ID NO: 59010 - DNA, 20 bp, Artificial Sequence
  chemically synthesized
gtttcttaagctgttttgta

SEQ ID NO: 59011 - DNA, 20 bp, Artificial Sequence
  chemically synthesized
ggtttcttaagctgttttgt

SEQ ID NO: 59012 - DNA, 20 bp, Artificial Sequence
  chemically synthesized
gaaagtgtgatctgtcacac

SEQ ID NO: 59013 - DNA, 20 bp, Artificial Sequence
  chemically synthesized
ggaaagtgtgatctgtcaca

SEQ ID NO: 59014 - DNA, 20 bp, Artificial Sequence
  chemically synthesized
tggaaagtgtgatctgtcac

SEQ ID NO: 59015 - DNA, 20 bp, Artificial Sequence
  chemically synthesized
cttttggaaagtgtgatctg

SEQ ID NO: 59016 - DNA, 20 bp, Artificial Sequence
  chemically synthesized
ctattacttttggaaagtgt

SEQ ID NO: 59017 - DNA, 20 bp, Artificial Sequence
  chemically synthesized
gctattacttttggaaagtg

SEQ ID NO: 59018 - DNA, 20 bp, Artificial Sequence
  chemically synthesized
tgctattacttttggaaagt

SEQ ID NO: 59019 - DNA, 20 bp, Artificial Sequence
  chemically synthesized
ttgctattacttttggaaag

SEQ ID NO: 59020 - DNA, 20 bp, Artificial Sequence
  chemically synthesized
tttgctattacttttggaaa

SEQ ID NO: 59021 - DNA, 20 bp, Artificial Sequence
  chemically synthesized
ttttgctattacttttggaa

SEQ ID NO: 59022 - DNA, 20 bp, Artificial Sequence
  chemically synthesized
tttttgctattacttttgga

SEQ ID NO: 59023 - DNA, 20 bp, Artificial Sequence
  chemically synthesized
ttttttgctattacttttgg

SEQ ID NO: 59024 - DNA, 20 bp, Artificial Sequence
  chemically synthesized
tttttttgctattacttttg

SEQ ID NO: 59025 - DNA, 20 bp, Artificial Sequence
  chemically synthesized
ttttttttgctattactttt

SEQ ID NO: 59026 - DNA, 20 bp, Artificial Sequence
  chemically synthesized
tttttttttgctattacttt

SEQ ID NO: 59027 - DNA, 20 bp, Artificial Sequence
  chemically synthesized
ttttttttttgctattactt

SEQ ID NO: 59028 - DNA, 20 bp, Artificial Sequence
  chemically synthesized
tttttttttttgctattact

SEQ ID NO: 59029 - DNA, 20 bp, Artificial Sequence
  chemically synthesized
tagcaggatgctggaagaaa

SEQ ID NO: 59030 - DNA, 20 bp, Artificial Sequence
  chemically synthesized
tatagacgcagtatctgata

SEQ ID NO: 59031 - DNA, 20 bp, Artificial Sequence
  chemically synthesized
ttctatagacgcagtatctg

SEQ ID NO: 59032 - DNA, 20 bp, Artificial Sequence
  chemically synthesized
tagattcttctatagacgca

SEQ ID NO: 59033 - DNA, 20 bp, Artificial Sequence
  chemically synthesized
ttatagattcttctatagac

SEQ ID NO: 59034 - DNA, 20 bp, Artificial Sequence
  chemically synthesized
tgttcttatagattcttcta

SEQ ID NO: 59035 - DNA, 20 bp, Artificial Sequence
  chemically synthesized
tacatactgcttctgttctt

SEQ ID NO: 59036 - DNA, 20 bp, Artificial Sequence
  chemically synthesized
ctgtgaatgttgtacatact

SEQ ID NO: 59037 - DNA, 20 bp, Artificial Sequence
  chemically synthesized
gtgaaacttcctgtgaatgt

SEQ ID NO: 59038 - DNA, 20 bp, Artificial Sequence
  chemically synthesized
ggtgaaacttcctgtgaatg

SEQ ID NO: 59039 - DNA, 20 bp, Artificial Sequence
  chemically synthesized
gatctggcaggactccgatt

SEQ ID NO: 59040 - DNA, 20 bp, Artificial Sequence
  chemically synthesized
gggaaaaaaaattagatctg

SEQ ID NO: 59041 - DNA, 20 bp, Artificial Sequence
  chemically synthesized
agctactgactgagacaaac

SEQ ID NO: 59042 - DNA, 20 bp, Artificial Sequence
  chemically synthesized
tcttaagctactgactgaga

SEQ ID NO: 59043 - DNA, 20 bp, Artificial Sequence
  chemically synthesized
cattgtcttaagctactgac

SEQ ID NO: 59044 - DNA, 20 bp, Artificial Sequence
  chemically synthesized
ccattgtcttaagctactga

SEQ ID NO: 59045 - DNA, 20 bp, Artificial Sequence
  chemically synthesized
tttccattgtcttaagctac

SEQ ID NO: 59046 - DNA, 20 bp, Artificial Sequence
  chemically synthesized
aaagtggcactgattatttc

SEQ ID NO: 59047 - DNA, 20 bp, Artificial Sequence
  chemically synthesized
cctaaaaaggcatcccaatt

SEQ ID NO: 59048 - DNA, 20 bp, Artificial Sequence
  chemically synthesized
ccttgcctaaaaaggcatcc

SEQ ID NO: 59049 - DNA, 20 bp, Artificial Sequence
  chemically synthesized
cccttgcctaaaaaggcatc

SEQ ID NO: 59050 - DNA, 20 bp, Artificial Sequence
  chemically synthesized
agaggtcactttcccttgcc

SEQ ID NO: 59051 - DNA, 20 bp, Artificial Sequence
  chemically synthesized
aagaggtcactttcccttgc

SEQ ID NO: 59052 - DNA, 20 bp, Artificial Sequence
  chemically synthesized
taagaggtcactttcccttg

SEQ ID NO: 59053 - DNA, 20 bp, Artificial Sequence
  chemically synthesized
ttaagaggtcactttccctt

SEQ ID NO: 59054 - DNA, 20 bp, Artificial Sequence
  chemically synthesized
tttaagaggtcactttccct

SEQ ID NO: 59055 - DNA, 20 bp, Artificial Sequence
  chemically synthesized
cttttttaagaggtcacttt

SEQ ID NO: 59056 - DNA, 20 bp, Artificial Sequence
  chemically synthesized
gcttttttaagaggtcactt

SEQ ID NO: 59057 - DNA, 20 bp, Artificial Sequence
  chemically synthesized
tgcttttttaagaggtcact

SEQ ID NO: 59058 - DNA, 20 bp, Artificial Sequence
  chemically synthesized
cagtcagaattttgcttttt

SEQ ID NO: 59059 - DNA, 20 bp, Artificial Sequence
  chemically synthesized
aatgaaggacaatgatagct

SEQ ID NO: 59060 - DNA, 20 bp, Artificial Sequence
  chemically synthesized
tcttaaatgaaggacaatga

SEQ ID NO: 59061 - DNA, 20 bp, Artificial Sequence
  chemically synthesized
gtcttaaatgaaggacaatg

SEQ ID NO: 59062 - DNA, 20 bp, Artificial Sequence
  chemically synthesized
tgtcttaaatgaaggacaat

SEQ ID NO: 59063 - DNA, 20 bp, Artificial Sequence
  chemically synthesized
ttgtcttaaatgaaggacaa

SEQ ID NO: 59064 - DNA, 20 bp, Artificial Sequence
  chemically synthesized
tttgtcttaaatgaaggaca

SEQ ID NO: 59065 - DNA, 20 bp, Artificial Sequence
  chemically synthesized
ttttgtcttaaatgaaggac

SEQ ID NO: 59066 - DNA, 20 bp, Artificial Sequence
  chemically synthesized
tttttgtcttaaatgaagga

SEQ ID NO: 59067 - DNA, 20 bp, Artificial Sequence
  chemically synthesized
cctccctagtattttttttg

SEQ ID NO: 59068 - DNA, 20 bp, Artificial Sequence
  chemically synthesized
ttccctccctagtatttttt

SEQ ID NO: 59069 - DNA, 20 bp, Artificial Sequence
  chemically synthesized
attccctccctagtattttt

SEQ ID NO: 59070 - DNA, 20 bp, Artificial Sequence
  chemically synthesized
caaatcataatttattccct

SEQ ID NO: 59071 - DNA, 20 bp, Artificial Sequence
  chemically synthesized
ttacaaatcataatttattc

SEQ ID NO: 59072 - DNA, 20 bp, Artificial Sequence
  chemically synthesized
attacaaatcataatttatt

SEQ ID NO: 59073 - DNA, 20 bp, Artificial Sequence
  chemically synthesized
actttattacaaatcataat

SEQ ID NO: 59074 - DNA, 20 bp, Artificial Sequence
  chemically synthesized
cactttattacaaatcataa

SEQ ID NO: 59075 - DNA, 20 bp, Artificial Sequence
  chemically synthesized
tcactttattacaaatcata

SEQ ID NO: 59076 - DNA, 20 bp, Artificial Sequence
  chemically synthesized
tccccatgctacctaatctc

SEQ ID NO: 59077 - DNA, 20 bp, Artificial Sequence
  chemically synthesized
cattatccccatgctaccta

SEQ ID NO: 59078 - DNA, 20 bp, Artificial Sequence
  chemically synthesized
ccattatccccatgctacct

SEQ ID NO: 59079 - DNA, 20 bp, Artificial Sequence
  chemically synthesized
tttccattatccccatgcta

SEQ ID NO: 59080 - DNA, 20 bp, Artificial Sequence
  chemically synthesized
atttccattatccccatgct

SEQ ID NO: 59081 - DNA, 20 bp, Artificial Sequence
  chemically synthesized
aaagaagagacactttattt

SEQ ID NO: 59082 - DNA, 20 bp, Artificial Sequence
  chemically synthesized
caaagaagagacactttatt

SEQ ID NO: 59083 - DNA, 20 bp, Artificial Sequence
  chemically synthesized
tttcaaagaagagacacttt

SEQ ID NO: 59084 - DNA, 20 bp, Artificial Sequence
  chemically synthesized
atattatttcaaagaagaga

SEQ ID NO: 59085 - DNA, 20 bp, Artificial Sequence
  chemically synthesized
ttcatattatttcaaagaag

SEQ ID NO: 59086 - DNA, 20 bp, Artificial Sequence
  chemically synthesized
attgttcatattatttcaaa

SEQ ID NO: 59087 - DNA, 20 bp, Artificial Sequence
  chemically synthesized
cattgattgttcatattatt

SEQ ID NO: 59088 - DNA, 20 bp, Artificial Sequence
  chemically synthesized
ttacattgattgttcatatt

SEQ ID NO: 59089 - DNA, 20 bp, Artificial Sequence
  chemically synthesized
gttacattgattgttcatat

SEQ ID NO: 59090 - DNA, 20 bp, Artificial Sequence
  chemically synthesized
tgctacatttgttacattga

SEQ ID NO: 59091 - DNA, 20 bp, Artificial Sequence
  chemically synthesized
ctgctacatttgttacattg

SEQ ID NO: 59092 - DNA, 20 bp, Artificial Sequence
  chemically synthesized
tctgctacatttgttacatt

SEQ ID NO: 59093 - DNA, 20 bp, Artificial Sequence
  chemically synthesized
ttctgctacatttgttacat

SEQ ID NO: 59094 - DNA, 20 bp, Artificial Sequence
  chemically synthesized
tttctgctacatttgttaca

SEQ ID NO: 59095 - DNA, 20 bp, Artificial Sequence
  chemically synthesized
aactggagttttttctgcta

SEQ ID NO: 59096 - DNA, 20 bp, Artificial Sequence
  chemically synthesized
aaactggagttttttctgct

SEQ ID NO: 59097 - DNA, 20 bp, Artificial Sequence
  chemically synthesized
tgtatttaaactggagtttt

SEQ ID NO: 59098 - DNA, 20 bp, Artificial Sequence
  chemically synthesized
ctgtatttaaactggagttt

SEQ ID NO: 59099 - DNA, 20 bp, Artificial Sequence
  chemically synthesized
tctgtatttaaactggagtt

SEQ ID NO: 59100 - DNA, 20 bp, Artificial Sequence
  chemically synthesized
ttttctgtatttaaactgga

SEQ ID NO: 59101 - DNA, 20 bp, Artificial Sequence
  chemically synthesized
aacacattcttttctgtatt

SEQ ID NO: 59102 - DNA, 20 bp, Artificial Sequence
  chemically synthesized
aagaaccagaggcattgaac

SEQ ID NO: 59103 - DNA, 20 bp, Artificial Sequence
  chemically synthesized
tgagttaaagaaccagaggc

SEQ ID NO: 59104 - DNA, 20 bp, Artificial Sequence
  chemically synthesized
ctgagttaaagaaccagagg

SEQ ID NO: 59105 - DNA, 20 bp, Artificial Sequence
  chemically synthesized
caatagaaaaaaaaaatcca

SEQ ID NO: 59106 - DNA, 20 bp, Artificial Sequence
  chemically synthesized
ccaatagaaaaaaaaaatcc

SEQ ID NO: 59107 - DNA, 20 bp, Artificial Sequence
  chemically synthesized
tccaatagaaaaaaaaaatc

SEQ ID NO: 59108 - DNA, 20 bp, Artificial Sequence
  chemically synthesized
aaaaccaaccaaccaacaaa

SEQ ID NO: 59109 - DNA, 20 bp, Artificial Sequence
  chemically synthesized
aaggaagaaaagcccaaggg

SEQ ID NO: 59110 - DNA, 20 bp, Artificial Sequence
  chemically synthesized
tgtagtattcaaggaagaaa

SEQ ID NO: 59111 - DNA, 20 bp, Artificial Sequence
  chemically synthesized
ataaaatagcagactctgtg

SEQ ID NO: 59112 - DNA, 20 bp, Artificial Sequence
  chemically synthesized
aaatatggcatgaccttaat

SEQ ID NO: 59113 - DNA, 20 bp, Artificial Sequence
  chemically synthesized
gaaatatggcatgaccttaa

SEQ ID NO: 59114 - DNA, 20 bp, Artificial Sequence
  chemically synthesized
tgaaatatggcatgacctta

SEQ ID NO: 59115 - DNA, 20 bp, Artificial Sequence
  chemically synthesized
atgaaacaaataaatgcatc

SEQ ID NO: 59116 - DNA, 20 bp, Artificial Sequence
  chemically synthesized
caagtctcctggggaggaac

SEQ ID NO: 59117 - DNA, 20 bp, Artificial Sequence
  chemically synthesized
tgcatcttccaagtctcctg

SEQ ID NO: 59118 - DNA, 20 bp, Artificial Sequence
  chemically synthesized
caactggctatagcatgaga

SEQ ID NO: 59119 - DNA, 20 bp, Artificial Sequence
  chemically synthesized
acttccaactggctatagca

SEQ ID NO: 59120 - DNA, 20 bp, Artificial Sequence
  chemically synthesized
acatctgggtcctcaaaagc

SEQ ID NO: 59121 - DNA, 20 bp, Artificial Sequence
  chemically synthesized
gtgatgttgacatctgggtc

SEQ ID NO: 59122 - DNA, 20 bp, Artificial Sequence
  chemically synthesized
cagattggtgatgttgacat

SEQ ID NO: 59123 - DNA, 20 bp, Artificial Sequence
  chemically synthesized
aaattccagattggtgatgt

SEQ ID NO: 59124 - DNA, 20 bp, Artificial Sequence
  chemically synthesized
caaattccagattggtgatg

SEQ ID NO: 59125 - DNA, 20 bp, Artificial Sequence
  chemically synthesized
aaaccaccatccctcaccat

SEQ ID NO: 59126 - DNA, 20 bp, Artificial Sequence
  chemically synthesized
aaaagagcatatgaaaagag

SEQ ID NO: 59127 - DNA, 20 bp, Artificial Sequence
  chemically synthesized
tggctattaaaaagagcata

SEQ ID NO: 59128 - DNA, 20 bp, Artificial Sequence
  chemically synthesized
gtggctattaaaaagagcat

SEQ ID NO: 59129 - DNA, 20 bp, Artificial Sequence
  chemically synthesized
tgtggctattaaaaagagca

SEQ ID NO: 59130 - DNA, 20 bp, Artificial Sequence
  chemically synthesized
ttttgtggctattaaaaaga

SEQ ID NO: 59131 - DNA, 20 bp, Artificial Sequence
  chemically synthesized
cttttgtggctattaaaaag

SEQ ID NO: 59132 - DNA, 20 bp, Artificial Sequence
  chemically synthesized
tttcttttgtggctattaaa

SEQ ID NO: 59133 - DNA, 20 bp, Artificial Sequence
  chemically synthesized
ggccacatattctttctttt

SEQ ID NO: 59134 - DNA, 20 bp, Artificial Sequence
  chemically synthesized
attaggccacatattctttc

SEQ ID NO: 59135 - DNA, 20 bp, Artificial Sequence
  chemically synthesized
ttaattaggccacatattct

SEQ ID NO: 59136 - DNA, 20 bp, Artificial Sequence
  chemically synthesized
gttaattaggccacatattc

SEQ ID NO: 59137 - DNA, 20 bp, Artificial Sequence
  chemically synthesized
acatttgttaattaggccac

SEQ ID NO: 59138 - DNA, 20 bp, Artificial Sequence
  chemically synthesized
gatgttaacatttgttaatt

SEQ ID NO: 59139 - DNA, 20 bp, Artificial Sequence
  chemically synthesized
cttagatgttaacatttgtt

SEQ ID NO: 59140 - DNA, 20 bp, Artificial Sequence
  chemically synthesized
ggaattccttagatgttaac

SEQ ID NO: 59141 - DNA, 20 bp, Artificial Sequence
  chemically synthesized
gggaattccttagatgttaa

SEQ ID NO: 59142 - DNA, 20 bp, Artificial Sequence
  chemically synthesized
aggaggcctttgggaattcc

SEQ ID NO: 59143 - DNA, 20 bp, Artificial Sequence
  chemically synthesized
caggaggcctttgggaattc

SEQ ID NO: 59144 - DNA, 20 bp, Artificial Sequence
  chemically synthesized
gtgaaggacaaggagtttca

SEQ ID NO: 59145 - DNA, 20 bp, Artificial Sequence
  chemically synthesized
ggtgaaggacaaggagtttc

SEQ ID NO: 59146 - DNA, 20 bp, Artificial Sequence
  chemically synthesized
tggtgaaggacaaggagttt

SEQ ID NO: 59147 - DNA, 20 bp, Artificial Sequence
  chemically synthesized
ttggtgaaggacaaggagtt

SEQ ID NO: 59148 - DNA, 20 bp, Artificial Sequence
  chemically synthesized
tatgagtgtttttggtgaag

SEQ ID NO: 59149 - DNA, 20 bp, Artificial Sequence
  chemically synthesized
gtatgagtgtttttggtgaa

SEQ ID NO: 59150 - DNA, 20 bp, Artificial Sequence
  chemically synthesized
actgagtctcagggtctgaa

SEQ ID NO: 59151 - DNA, 20 bp, Artificial Sequence
  chemically synthesized
gactgagtctcagggtctga

SEQ ID NO: 59152 - DNA, 20 bp, Artificial Sequence
  chemically synthesized
ggagggatgtgggatcccca

SEQ ID NO: 59153 - DNA, 20 bp, Artificial Sequence
  chemically synthesized
tgatatgaagttgggaggga

SEQ ID NO: 59154 - DNA, 20 bp, Artificial Sequence
  chemically synthesized
aattctgatatgaagttggg

SEQ ID NO: 59155 - DNA, 20 bp, Artificial Sequence
  chemically synthesized
aaattctgatatgaagttgg

SEQ ID NO: 59156 - DNA, 20 bp, Artificial Sequence
  chemically synthesized
taggagacgcaggatttaaa

SEQ ID NO: 59157 - DNA, 20 bp, Artificial Sequence
  chemically synthesized
gtgagaagtgttgtaggaga

SEQ ID NO: 59158 - DNA, 20 bp, Artificial Sequence
  chemically synthesized
ggtgagaagtgttgtaggag

SEQ ID NO: 59159 - DNA, 20 bp, Artificial Sequence
  chemically synthesized
tggtgagaagtgttgtagga

SEQ ID NO: 59160 - DNA, 20 bp, Artificial Sequence
  chemically synthesized
ttggtgagaagtgttgtagg

SEQ ID NO: 59161 - DNA, 20 bp, Artificial Sequence
  chemically synthesized
ggcaaacagatttttggtga

SEQ ID NO: 59162 - DNA, 20 bp, Artificial Sequence
  chemically synthesized
tctcgtgttgggcaaacaga

SEQ ID NO: 59163 - DNA, 20 bp, Artificial Sequence
  chemically synthesized
aagacactggattgtctcgt

SEQ ID NO: 59164 - DNA, 20 bp, Artificial Sequence
  chemically synthesized
actctcagatgcaacttgaa

SEQ ID NO: 59165 - DNA, 20 bp, Artificial Sequence
  chemically synthesized
aactctcagatgcaacttga

SEQ ID NO: 59166 - DNA, 20 bp, Artificial Sequence
  chemically synthesized
gaaacaaggcagtttaactc

SEQ ID NO: 59167 - DNA, 20 bp, Artificial Sequence
  chemically synthesized
ggattggaaacaaggcagtt

SEQ ID NO: 59168 - DNA, 20 bp, Artificial Sequence
  chemically synthesized
tctaggtcaaaaaactagta

SEQ ID NO: 59169 - DNA, 20 bp, Artificial Sequence
  chemically synthesized
ctctaggtcaaaaaactagt

SEQ ID NO: 59170 - DNA, 20 bp, Artificial Sequence
  chemically synthesized
cataactttctctaggtcaa

SEQ ID NO: 59171 - DNA, 20 bp, Artificial Sequence
  chemically synthesized
caggtgaggaaactgaggca

SEQ ID NO: 59172 - DNA, 20 bp, Artificial Sequence
  chemically synthesized
acaggtgaggaaactgaggc

SEQ ID NO: 59173 - DNA, 20 bp, Artificial Sequence
  chemically synthesized
tacaggtgaggaaactgagg

SEQ ID NO: 59174 - DNA, 20 bp, Artificial Sequence
  chemically synthesized
tctcattttacaggtgagga

SEQ ID NO: 59175 - DNA, 20 bp, Artificial Sequence
  chemically synthesized
ctgtgaggcaggttatctca

SEQ ID NO: 59176 - DNA, 20 bp, Artificial Sequence
  chemically synthesized
accatcacagccttcctgtg

SEQ ID NO: 59177 - DNA, 20 bp, Artificial Sequence
  chemically synthesized
aaccatcacagccttcctgt

SEQ ID NO: 59178 - DNA, 20 bp, Artificial Sequence
  chemically synthesized
tttaaccatcacagccttcc

SEQ ID NO: 59179 - DNA, 20 bp, Artificial Sequence
  chemically synthesized
tatgatgaaattatttaacc

SEQ ID NO: 59180 - DNA, 20 bp, Artificial Sequence
  chemically synthesized
atatgatgaaattatttaac

SEQ ID NO: 59181 - DNA, 20 bp, Artificial Sequence
  chemically synthesized
gaatgatttatatgatgaaa

SEQ ID NO: 59182 - DNA, 20 bp, Artificial Sequence
  chemically synthesized
ggaatgatttatatgatgaa

SEQ ID NO: 59183 - DNA, 20 bp, Artificial Sequence
  chemically synthesized
actggccgactatttggaat

SEQ ID NO: 59184 - DNA, 20 bp, Artificial Sequence
  chemically synthesized
ttcactggccgactatttgg

SEQ ID NO: 59185 - DNA, 20 bp, Artificial Sequence
  chemically synthesized
ctcgttattcactggccgac

SEQ ID NO: 59186 - DNA, 20 bp, Artificial Sequence
  chemically synthesized
cccattactcgttattcact

SEQ ID NO: 59187 - DNA, 20 bp, Artificial Sequence
  chemically synthesized
cttccccattactcgttatt

SEQ ID NO: 59188 - DNA, 20 bp, Artificial Sequence
  chemically synthesized
atgttgcttccccattactc

SEQ ID NO: 59189 - DNA, 20 bp, Artificial Sequence
  chemically synthesized
aatgttgcttccccattact

SEQ ID NO: 59190 - DNA, 20 bp, Artificial Sequence
  chemically synthesized
taatttaatgttgcttcccc

SEQ ID NO: 59191 - DNA, 20 bp, Artificial Sequence
  chemically synthesized
acagaattataatttaatgt

SEQ ID NO: 59192 - DNA, 20 bp, Artificial Sequence
  chemically synthesized
ggtcaatattcacagaatta

SEQ ID NO: 59193 - DNA, 20 bp, Artificial Sequence
  chemically synthesized
tgtcaagatggtagaagtta

SEQ ID NO: 59194 - DNA, 20 bp, Artificial Sequence
  chemically synthesized
agaggatcatctgaagtcaa

SEQ ID NO: 59195 - DNA, 20 bp, Artificial Sequence
  chemically synthesized
cattgagaggatcatctgaa

SEQ ID NO: 59196 - DNA, 20 bp, Artificial Sequence
  chemically synthesized
acattgagaggatcatctga

SEQ ID NO: 59197 - DNA, 20 bp, Artificial Sequence
  chemically synthesized
gaaaatttacattgagagga

SEQ ID NO: 59198 - DNA, 20 bp, Artificial Sequence
  chemically synthesized
ggaaaatttacattgagagg

SEQ ID NO: 59199 - DNA, 20 bp, Artificial Sequence
  chemically synthesized
tggaaaatttacattgagag

SEQ ID NO: 59200 - DNA, 20 bp, Artificial Sequence
  chemically synthesized
ttggaaaatttacattgaga

SEQ ID NO: 59201 - DNA, 20 bp, Artificial Sequence
  chemically synthesized
ctgtggatttttggaaaatt

SEQ ID NO: 59202 - DNA, 20 bp, Artificial Sequence
  chemically synthesized
ttcctgtggatttttggaaa

SEQ ID NO: 59203 - DNA, 20 bp, Artificial Sequence
  chemically synthesized
tgaaacaaaatgccaactta

SEQ ID NO: 59204 - DNA, 20 bp, Artificial Sequence
  chemically synthesized
tgtgagaccttgtgaaacaa

SEQ ID NO: 59205 - DNA, 20 bp, Artificial Sequence
  chemically synthesized
ctgtgagaccttgtgaaaca

SEQ ID NO: 59206 - DNA, 20 bp, Artificial Sequence
  chemically synthesized
tctgtgagaccttgtgaaac

SEQ ID NO: 59207 - DNA, 20 bp, Artificial Sequence
  chemically synthesized
tcttttctgtgagaccttgt

SEQ ID NO: 59208 - DNA, 20 bp, Artificial Sequence
  chemically synthesized
gtcttttctgtgagaccttg

SEQ ID NO: 59209 - DNA, 20 bp, Artificial Sequence
  chemically synthesized
ctttgtcttttctgtgagac

SEQ ID NO: 59210 - DNA, 20 bp, Artificial Sequence
  chemically synthesized
cctttgtcttttctgtgaga

SEQ ID NO: 59211 - DNA, 20 bp, Artificial Sequence
  chemically synthesized
tcctttgtcttttctgtgag

SEQ ID NO: 59212 - DNA, 20 bp, Artificial Sequence
  chemically synthesized
aaaccagactcttttccttt

SEQ ID NO: 59213 - DNA, 20 bp, Artificial Sequence
  chemically synthesized
caaaccagactcttttcctt

SEQ ID NO: 59214 - DNA, 20 bp, Artificial Sequence
  chemically synthesized
gtaaactttcaaaccagact

SEQ ID NO: 59215 - DNA, 20 bp, Artificial Sequence
  chemically synthesized
agtaaactttcaaaccagac

SEQ ID NO: 59216 - DNA, 20 bp, Artificial Sequence
  chemically synthesized
cctgagacctttagtaaact

SEQ ID NO: 59217 - DNA, 20 bp, Artificial Sequence
  chemically synthesized
tggatgaaggagaaggagaa

SEQ ID NO: 59218 - DNA, 20 bp, Artificial Sequence
  chemically synthesized
gcaacaagagatgacttatg

SEQ ID NO: 59219 - DNA, 20 bp, Artificial Sequence
  chemically synthesized
tcaaatcaccagagatagta

SEQ ID NO: 59220 - DNA, 20 bp, Artificial Sequence
  chemically synthesized
ctcaaatcaccagagatagt

SEQ ID NO: 59221 - DNA, 20 bp, Artificial Sequence
  chemically synthesized
aagctagagtagtttctcaa

SEQ ID NO: 59222 - DNA, 20 bp, Artificial Sequence
  chemically synthesized
caagctagagtagtttctca

SEQ ID NO: 59223 - DNA, 20 bp, Artificial Sequence
  chemically synthesized
gagatagcctcaggtcagaa

SEQ ID NO: 59224 - DNA, 20 bp, Artificial Sequence
  chemically synthesized
ggagatagcctcaggtcaga

SEQ ID NO: 59225 - DNA, 20 bp, Artificial Sequence
  chemically synthesized
ggatatgaatttggagatag

SEQ ID NO: 59226 - DNA, 20 bp, Artificial Sequence
  chemically synthesized
ctcactaggacactaactaa

SEQ ID NO: 59227 - DNA, 20 bp, Artificial Sequence
  chemically synthesized
gctcactaggacactaacta

SEQ ID NO: 59228 - DNA, 20 bp, Artificial Sequence
  chemically synthesized
ctttgctcactaggacacta

SEQ ID NO: 59229 - DNA, 20 bp, Artificial Sequence
  chemically synthesized
actttgctcactaggacact

SEQ ID NO: 59230 - DNA, 20 bp, Artificial Sequence
  chemically synthesized
atttactttgctcactagga

SEQ ID NO: 59231 - DNA, 20 bp, Artificial Sequence
  chemically synthesized
ctactggtggatcttgattt

SEQ ID NO: 59232 - DNA, 20 bp, Artificial Sequence
  chemically synthesized
tattactactggtggatctt

SEQ ID NO: 59233 - DNA, 20 bp, Artificial Sequence
  chemically synthesized
tctcagtgtctatggaatgt

SEQ ID NO: 59234 - DNA, 20 bp, Artificial Sequence
  chemically synthesized
gactatagactgtggagaat

SEQ ID NO: 59235 - DNA, 20 bp, Artificial Sequence
  chemically synthesized
ggactatagactgtggagaa

SEQ ID NO: 59236 - DNA, 20 bp, Artificial Sequence
  chemically synthesized
tttggactatagactgtgga

SEQ ID NO: 59237 - DNA, 20 bp, Artificial Sequence
  chemically synthesized
agggcttgtttggactatag

SEQ ID NO: 59238 - DNA, 20 bp, Artificial Sequence
  chemically synthesized
acaaaaactggaattcaggg

SEQ ID NO: 59239 - DNA, 20 bp, Artificial Sequence
  chemically synthesized
tctaaggactgcagcagaaa

SEQ ID NO: 59240 - DNA, 20 bp, Artificial Sequence
  chemically synthesized
atctaaggactgcagcagaa

SEQ ID NO: 59241 - DNA, 20 bp, Artificial Sequence
  chemically synthesized
gggaagtgaacagaggcaga

SEQ ID NO: 59242 - DNA, 20 bp, Artificial Sequence
  chemically synthesized
ctggaaaatgtgttagggaa

SEQ ID NO: 59243 - DNA, 20 bp, Artificial Sequence
  chemically synthesized
ttcctggaaaatgtgttagg

SEQ ID NO: 59244 - DNA, 20 bp, Artificial Sequence
  chemically synthesized
attcctggaaaatgtgttag

SEQ ID NO: 59245 - DNA, 20 bp, Artificial Sequence
  chemically synthesized
tattcctggaaaatgtgtta

SEQ ID NO: 59246 - DNA, 20 bp, Artificial Sequence
  chemically synthesized
acatattttattcctggaaa

SEQ ID NO: 59247 - DNA, 20 bp, Artificial Sequence
  chemically synthesized
gacatattttattcctggaa

SEQ ID NO: 59248 - DNA, 20 bp, Artificial Sequence
  chemically synthesized
tgacatattttattcctgga

SEQ ID NO: 59249 - DNA, 20 bp, Artificial Sequence
  chemically synthesized
ttttgacatattttattcct

SEQ ID NO: 59250 - DNA, 20 bp, Artificial Sequence
  chemically synthesized
aggttcttttgacatatttt

SEQ ID NO: 59251 - DNA, 20 bp, Artificial Sequence
  chemically synthesized
tggacatcgaactggttcag

SEQ ID NO: 59252 - DNA, 20 bp, Artificial Sequence
  chemically synthesized
cagcctagattgtggacatc

SEQ ID NO: 59253 - DNA, 20 bp, Artificial Sequence
  chemically synthesized
ccagcctagattgtggacat

SEQ ID NO: 59254 - DNA, 20 bp, Artificial Sequence
  chemically synthesized
gtgcaatccatttccagcct

SEQ ID NO: 59255 - DNA, 20 bp, Artificial Sequence
  chemically synthesized
agtgcaatccatttccagcc

SEQ ID NO: 59256 - DNA, 20 bp, Artificial Sequence
  chemically synthesized
tagtgcaatccatttccagc

SEQ ID NO: 59257 - DNA, 20 bp, Artificial Sequence
  chemically synthesized
tggctgttttagtgcaatcc

SEQ ID NO: 59258 - DNA, 20 bp, Artificial Sequence
  chemically synthesized
ttatggctgttttagtgcaa

SEQ ID NO: 59259 - DNA, 20 bp, Artificial Sequence
  chemically synthesized
aatgagttgttatggctgtt

SEQ ID NO: 59260 - DNA, 20 bp, Artificial Sequence
  chemically synthesized
gaatgagttgttatggctgt

SEQ ID NO: 59261 - DNA, 20 bp, Artificial Sequence
  chemically synthesized
tttgaatgagttgttatggc

SEQ ID NO: 59262 - DNA, 20 bp, Artificial Sequence
  chemically synthesized
cccatgaaaatgagtgcctt

SEQ ID NO: 59263 - DNA, 20 bp, Artificial Sequence
  chemically synthesized
gcccatgaaaatgagtgcct

SEQ ID NO: 59264 - DNA, 20 bp, Artificial Sequence
  chemically synthesized
aagaagccaaagtcaaacct

SEQ ID NO: 59265 - DNA, 20 bp, Artificial Sequence
  chemically synthesized
gccaagagaaaccaggatga

SEQ ID NO: 59266 - DNA, 20 bp, Artificial Sequence
  chemically synthesized
agtgggcaaggaagtggtca

SEQ ID NO: 59267 - DNA, 20 bp, Artificial Sequence
  chemically synthesized
gagtgggcaaggaagtggtc

SEQ ID NO: 59268 - DNA, 20 bp, Artificial Sequence
  chemically synthesized
aagggtaagtatgtttgagt

SEQ ID NO: 59269 - DNA, 20 bp, Artificial Sequence
  chemically synthesized
caatatgacaggaaaagtca

SEQ ID NO: 59270 - DNA, 20 bp, Artificial Sequence
  chemically synthesized
gaaaacccaaatagaggagg

SEQ ID NO: 59271 - DNA, 20 bp, Artificial Sequence
  chemically synthesized
caactgaaatatctgaatcc

SEQ ID NO: 59272 - DNA, 20 bp, Artificial Sequence
  chemically synthesized
ccaactgaaatatctgaatc

SEQ ID NO: 59273 - DNA, 20 bp, Artificial Sequence
  chemically synthesized
aggcagtccctttccaactg

SEQ ID NO: 59274 - DNA, 20 bp, Artificial Sequence
  chemically synthesized
ttaaggcagtccctttccaa

SEQ ID NO: 59275 - DNA, 20 bp, Artificial Sequence
  chemically synthesized
cttaaggcagtccctttcca

SEQ ID NO: 59276 - DNA, 20 bp, Artificial Sequence
  chemically synthesized
tttcttaaggcagtcccttt

SEQ ID NO: 59277 - DNA, 20 bp, Artificial Sequence
  chemically synthesized
ctttcttaaggcagtccctt

SEQ ID NO: 59278 - DNA, 20 bp, Artificial Sequence
  chemically synthesized
cactgaaaacgtttctttct

SEQ ID NO: 59279 - DNA, 20 bp, Artificial Sequence
  chemically synthesized
ccactgaaaacgtttctttc

SEQ ID NO: 59280 - DNA, 20 bp, Artificial Sequence
  chemically synthesized
tccactgaaaacgtttcttt

SEQ ID NO: 59281 - DNA, 20 bp, Artificial Sequence
  chemically synthesized
aagagctcatacatatattt

SEQ ID NO: 59282 - DNA, 20 bp, Artificial Sequence
  chemically synthesized
atctattaaagagctcatac

SEQ ID NO: 59283 - DNA, 20 bp, Artificial Sequence
  chemically synthesized
agggctctgaactccaggag

SEQ ID NO: 59284 - DNA, 20 bp, Artificial Sequence
  chemically synthesized
aagggctctgaactccagga

SEQ ID NO: 59285 - DNA, 20 bp, Artificial Sequence
  chemically synthesized
taagggctctgaactccagg

SEQ ID NO: 59286 - DNA, 20 bp, Artificial Sequence
  chemically synthesized
tgaaactgggcatcctttta

SEQ ID NO: 59287 - DNA, 20 bp, Artificial Sequence
  chemically synthesized
atgagcaatggacaatcaag

SEQ ID NO: 59288 - DNA, 20 bp, Artificial Sequence
  chemically synthesized
agaatgaaattaatgagcaa

SEQ ID NO: 59289 - DNA, 20 bp, Artificial Sequence
  chemically synthesized
gagaatgaaattaatgagca

SEQ ID NO: 59290 - DNA, 20 bp, Artificial Sequence
  chemically synthesized
tgagaatgaaattaatgagc

SEQ ID NO: 59291 - DNA, 20 bp, Artificial Sequence
  chemically synthesized
ccatgattttgagaatgaaa

SEQ ID NO: 59292 - DNA, 20 bp, Artificial Sequence
  chemically synthesized
tcagctcattcccatgattt

SEQ ID NO: 59293 - DNA, 20 bp, Artificial Sequence
  chemically synthesized
aggaggatctaaaatggtat

SEQ ID NO: 59294 - DNA, 20 bp, Artificial Sequence
  chemically synthesized
aaggaggatctaaaatggta

SEQ ID NO: 59295 - DNA, 20 bp, Artificial Sequence
  chemically synthesized
ggaatttaaggaggatctaa

SEQ ID NO: 59296 - DNA, 20 bp, Artificial Sequence
  chemically synthesized
tggtactgttgggaatttaa

SEQ ID NO: 59297 - DNA, 20 bp, Artificial Sequence
  chemically synthesized
ctggtactgttgggaattta

SEQ ID NO: 59298 - DNA, 20 bp, Artificial Sequence
  chemically synthesized
caggccccaacctgtagcaa

SEQ ID NO: 59299 - DNA, 20 bp, Artificial Sequence
  chemically synthesized
taaggaaagtatgtgtgaaa

SEQ ID NO: 59300 - DNA, 20 bp, Artificial Sequence
  chemically synthesized
gtaaggaaagtatgtgtgaa

SEQ ID NO: 59301 - DNA, 20 bp, Artificial Sequence
  chemically synthesized
agtatagaatatatttgtaa

SEQ ID NO: 59302 - DNA, 20 bp, Artificial Sequence
  chemically synthesized
ttgagtatagaatatatttg

SEQ ID NO: 59303 - DNA, 20 bp, Artificial Sequence
  chemically synthesized
aattcttgagtatagaatat

SEQ ID NO: 59304 - DNA, 20 bp, Artificial Sequence
  chemically synthesized
gttcaattcttgagtataga

SEQ ID NO: 59305 - DNA, 20 bp, Artificial Sequence
  chemically synthesized
agttcaattcttgagtatag

SEQ ID NO: 59306 - DNA, 20 bp, Artificial Sequence
  chemically synthesized
tagttcaattcttgagtata

SEQ ID NO: 59307 - DNA, 20 bp, Artificial Sequence
  chemically synthesized
ggtaaacatgggatgtggag

SEQ ID NO: 59308 - DNA, 20 bp, Artificial Sequence
  chemically synthesized
aggtaaacatgggatgtgga

SEQ ID NO: 59309 - DNA, 20 bp, Artificial Sequence
  chemically synthesized
taggtaaacatgggatgtgg

SEQ ID NO: 59310 - DNA, 20 bp, Artificial Sequence
  chemically synthesized
tgaattttaggtaaacatgg

SEQ ID NO: 59311 - DNA, 20 bp, Artificial Sequence
  chemically synthesized
ctgaattttaggtaaacatg

SEQ ID NO: 59312 - DNA, 20 bp, Artificial Sequence
  chemically synthesized
ataaataaatatagaagggg

SEQ ID NO: 59313 - DNA, 20 bp, Artificial Sequence
  chemically synthesized
gataaataaatatagaaggg

SEQ ID NO: 59314 - DNA, 20 bp, Artificial Sequence
  chemically synthesized
tcacgatttgataaataaat

SEQ ID NO: 59315 - DNA, 20 bp, Artificial Sequence
  chemically synthesized
ggacaaacatcaggtggaaa

SEQ ID NO: 59316 - DNA, 20 bp, Artificial Sequence
  chemically synthesized
ggtaagctagacagatacca

SEQ ID NO: 59317 - DNA, 20 bp, Artificial Sequence
  chemically synthesized
gggtaagctagacagatacc

SEQ ID NO: 59318 - DNA, 20 bp, Artificial Sequence
  chemically synthesized
tgggtaagctagacagatac

SEQ ID NO: 59319 - DNA, 20 bp, Artificial Sequence
  chemically synthesized
ttgggtaagctagacagata

SEQ ID NO: 59320 - DNA, 20 bp, Artificial Sequence
  chemically synthesized
gaacaggataaaaataaaaa

SEQ ID NO: 59321 - DNA, 20 bp, Artificial Sequence
  chemically synthesized
ccaacttggaacaggataaa

SEQ ID NO: 59322 - DNA, 20 bp, Artificial Sequence
  chemically synthesized
cccaacttggaacaggataa

SEQ ID NO: 59323 - DNA, 20 bp, Artificial Sequence
  chemically synthesized
gggtagataggctttcccaa

SEQ ID NO: 59324 - DNA, 20 bp, Artificial Sequence
  chemically synthesized
ttggggtagataggctttcc

SEQ ID NO: 59325 - DNA, 20 bp, Artificial Sequence
  chemically synthesized
cttgttggggtagataggct

SEQ ID NO: 59326 - DNA, 20 bp, Artificial Sequence
  chemically synthesized
tgttccttgttggggtagat

SEQ ID NO: 59327 - DNA, 20 bp, Artificial Sequence
  chemically synthesized
ctagggagttgtgttccttg

SEQ ID NO: 59328 - DNA, 20 bp, Artificial Sequence
  chemically synthesized
aagagtaggtgtgtatgtgt

SEQ ID NO: 59329 - DNA, 20 bp, Artificial Sequence
  chemically synthesized
aaagagtaggtgtgtatgtg

SEQ ID NO: 59330 - DNA, 20 bp, Artificial Sequence
  chemically synthesized
ggctttaaagagtaggtgtg

SEQ ID NO: 59331 - DNA, 20 bp, Artificial Sequence
  chemically synthesized
aggctttaaagagtaggtgt

SEQ ID NO: 59332 - DNA, 20 bp, Artificial Sequence
  chemically synthesized
tttaggctttaaagagtagg

SEQ ID NO: 59333 - DNA, 20 bp, Artificial Sequence
  chemically synthesized
gagtgtgcgattgtttaggc

SEQ ID NO: 59334 - DNA, 20 bp, Artificial Sequence
  chemically synthesized
agagtgtgcgattgtttagg

SEQ ID NO: 59335 - DNA, 20 bp, Artificial Sequence
  chemically synthesized
tagagtgtgcgattgtttag

SEQ ID NO: 59336 - DNA, 20 bp, Artificial Sequence
  chemically synthesized
actgctatcttttagagtgt

SEQ ID NO: 59337 - DNA, 20 bp, Artificial Sequence
  chemically synthesized
ttaactgctatcttttagag

SEQ ID NO: 59338 - DNA, 20 bp, Artificial Sequence
  chemically synthesized
gttaactgctatcttttaga

SEQ ID NO: 59339 - DNA, 20 bp, Artificial Sequence
  chemically synthesized
tgttaactgctatcttttag

SEQ ID NO: 59340 - DNA, 20 bp, Artificial Sequence
  chemically synthesized
cttttgttaactgctatctt

SEQ ID NO: 59341 - DNA, 20 bp, Artificial Sequence
  chemically synthesized
tcccaaatcgttacttttgt

SEQ ID NO: 59342 - DNA, 20 bp, Artificial Sequence
  chemically synthesized
aaactgttctcccaaatcgt

SEQ ID NO: 59343 - DNA, 20 bp, Artificial Sequence
  chemically synthesized
cttaaaactgttctcccaaa

SEQ ID NO: 59344 - DNA, 20 bp, Artificial Sequence
  chemically synthesized
gggacattccttaaaactgt

SEQ ID NO: 59345 - DNA, 20 bp, Artificial Sequence
  chemically synthesized
ggggacattccttaaaactg

SEQ ID NO: 59346 - DNA, 20 bp, Artificial Sequence
  chemically synthesized
tggggacattccttaaaact

SEQ ID NO: 59347 - DNA, 20 bp, Artificial Sequence
  chemically synthesized
ttttggggacattccttaaa

SEQ ID NO: 59348 - DNA, 20 bp, Artificial Sequence
  chemically synthesized
attattttggggacattcct

SEQ ID NO: 59349 - DNA, 20 bp, Artificial Sequence
  chemically synthesized
actggctaaatgtattgatt

SEQ ID NO: 59350 - DNA, 20 bp, Artificial Sequence
  chemically synthesized
attaactggctaaatgtatt

SEQ ID NO: 59351 - DNA, 20 bp, Artificial Sequence
  chemically synthesized
agttaattaactggctaaat

SEQ ID NO: 59352 - DNA, 20 bp, Artificial Sequence
  chemically synthesized
gtgaagaaatgttaagttaa

SEQ ID NO: 59353 - DNA, 20 bp, Artificial Sequence
  chemically synthesized
agctcctacagtcatgaaaa

SEQ ID NO: 59354 - DNA, 20 bp, Artificial Sequence
  chemically synthesized
tggtctgagagtgactggtt

SEQ ID NO: 59355 - DNA, 20 bp, Artificial Sequence
  chemically synthesized
ttgtggtctgagagtgactg

SEQ ID NO: 59356 - DNA, 20 bp, Artificial Sequence
  chemically synthesized
attgtggtctgagagtgact

SEQ ID NO: 59357 - DNA, 20 bp, Artificial Sequence
  chemically synthesized
gtttattgtggtctgagagt

SEQ ID NO: 59358 - DNA, 20 bp, Artificial Sequence
  chemically synthesized
ggtttattgtggtctgagag

SEQ ID NO: 59359 - DNA, 20 bp, Artificial Sequence
  chemically synthesized
acctttggtttattgtggtc

SEQ ID NO: 59360 - DNA, 20 bp, Artificial Sequence
  chemically synthesized
cacctttggtttattgtggt

SEQ ID NO: 59361 - DNA, 20 bp, Artificial Sequence
  chemically synthesized
cagaatctttcacctttggt

SEQ ID NO: 59362 - DNA, 20 bp, Artificial Sequence
  chemically synthesized
ttacagaatctttcaccttt

SEQ ID NO: 59363 - DNA, 20 bp, Artificial Sequence
  chemically synthesized
gttacagaatctttcacctt

SEQ ID NO: 59364 - DNA, 20 bp, Artificial Sequence
  chemically synthesized
tgttacagaatctttcacct

SEQ ID NO: 59365 - DNA, 20 bp, Artificial Sequence
  chemically synthesized
aatgcaggggagagtgccct

SEQ ID NO: 59366 - DNA, 20 bp, Artificial Sequence
  chemically synthesized
gagtgagctggccaggaggt

SEQ ID NO: 59367 - DNA, 20 bp, Artificial Sequence
  chemically synthesized
tctggcttcgagtgagctgg

SEQ ID NO: 59368 - DNA, 20 bp, Artificial Sequence
  chemically synthesized
gtctggcttcgagtgagctg

SEQ ID NO: 59369 - DNA, 20 bp, Artificial Sequence
  chemically synthesized
ctggactctgcacaaaaaga

SEQ ID NO: 59370 - DNA, 20 bp, Artificial Sequence
  chemically synthesized
gagaatggttcctggactct

SEQ ID NO: 59371 - DNA, 20 bp, Artificial Sequence
  chemically synthesized
cgagaatggttcctggactc

SEQ ID NO: 59372 - DNA, 20 bp, Artificial Sequence
  chemically synthesized
tctgcatgtgctcaaatgag

SEQ ID NO: 59373 - DNA, 20 bp, Artificial Sequence
  chemically synthesized
gtgaactggatgtgtgtaca

SEQ ID NO: 59374 - DNA, 20 bp, Artificial Sequence
  chemically synthesized
ccttggtgaactggatgtgt

SEQ ID NO: 59375 - DNA, 20 bp, Artificial Sequence
  chemically synthesized
gcttcccttggtgaactgga

SEQ ID NO: 59376 - DNA, 20 bp, Artificial Sequence
  chemically synthesized
ctacctacaacccacaatgt

SEQ ID NO: 59377 - DNA, 20 bp, Artificial Sequence
  chemically synthesized
actacctacaacccacaatg

SEQ ID NO: 59378 - DNA, 20 bp, Artificial Sequence
  chemically synthesized
tactacctacaacccacaat

SEQ ID NO: 59379 - DNA, 20 bp, Artificial Sequence
  chemically synthesized
taggaaggccttttactacc

SEQ ID NO: 59380 - DNA, 20 bp, Artificial Sequence
  chemically synthesized
aatcctaaggagtgtgttct

SEQ ID NO: 59381 - DNA, 20 bp, Artificial Sequence
  chemically synthesized
aaatcctaaggagtgtgttc

SEQ ID NO: 59382 - DNA, 20 bp, Artificial Sequence
  chemically synthesized
tttaaatcctaaggagtgtg

SEQ ID NO: 59383 - DNA, 20 bp, Artificial Sequence
  chemically synthesized
gtttaaatcctaaggagtgt

SEQ ID NO: 59384 - DNA, 20 bp, Artificial Sequence
  chemically synthesized
tgtttaaatcctaaggagtg

SEQ ID NO: 59385 - DNA, 20 bp, Artificial Sequence
  chemically synthesized
accgatgtaattttgtttaa

SEQ ID NO: 59386 - DNA, 20 bp, Artificial Sequence
  chemically synthesized
cattaaccgatgtaattttg

SEQ ID NO: 59387 - DNA, 20 bp, Artificial Sequence
  chemically synthesized
ccattaaccgatgtaatttt

SEQ ID NO: 59388 - DNA, 20 bp, Artificial Sequence
  chemically synthesized
tttccattaaccgatgtaat

SEQ ID NO: 59389 - DNA, 20 bp, Artificial Sequence
  chemically synthesized
cgtatatgaaagaattcttt

SEQ ID NO: 59390 - DNA, 20 bp, Artificial Sequence
  chemically synthesized
gcgtatatgaaagaattctt

SEQ ID NO: 59391 - DNA, 20 bp, Artificial Sequence
  chemically synthesized
ctctgggtaagtttgcgtat

SEQ ID NO: 59392 - DNA, 20 bp, Artificial Sequence
  chemically synthesized
gaagtgaagatctgggcaga

SEQ ID NO: 59393 - DNA, 20 bp, Artificial Sequence
  chemically synthesized
agctcagccaaatagctcta

SEQ ID NO: 59394 - DNA, 20 bp, Artificial Sequence
  chemically synthesized
aagctcagccaaatagctct

SEQ ID NO: 59395 - DNA, 20 bp, Artificial Sequence
  chemically synthesized
ctatgtgctgtttaagctca

SEQ ID NO: 59396 - DNA, 20 bp, Artificial Sequence
  chemically synthesized
cctatgtgctgtttaagctc

SEQ ID NO: 59397 - DNA, 20 bp, Artificial Sequence
  chemically synthesized
tcctatgtgctgtttaagct

SEQ ID NO: 59398 - DNA, 20 bp, Artificial Sequence
  chemically synthesized
ttcctatgtgctgtttaagc

SEQ ID NO: 59399 - DNA, 20 bp, Artificial Sequence
  chemically synthesized
tttttcctatgtgctgttta

SEQ ID NO: 59400 - DNA, 20 bp, Artificial Sequence
  chemically synthesized
gtttttcctatgtgctgttt

SEQ ID NO: 59401 - DNA, 20 bp, Artificial Sequence
  chemically synthesized
ccaatttgtttttcctatgt

SEQ ID NO: 59402 - DNA, 20 bp, Artificial Sequence
  chemically synthesized
tgtgataaacacagttacca

SEQ ID NO: 59403 - DNA, 20 bp, Artificial Sequence
  chemically synthesized
ctcttctgtgataaacacag

SEQ ID NO: 59404 - DNA, 20 bp, Artificial Sequence
  chemically synthesized
cctcttctgtgataaacaca

SEQ ID NO: 59405 - DNA, 20 bp, Artificial Sequence
  chemically synthesized
tcctcttctgtgataaacac

SEQ ID NO: 59406 - DNA, 20 bp, Artificial Sequence
  chemically synthesized
attttcctcttctgtgataa

SEQ ID NO: 59407 - DNA, 20 bp, Artificial Sequence
  chemically synthesized
aattttcctcttctgtgata

SEQ ID NO: 59408 - DNA, 20 bp, Artificial Sequence
  chemically synthesized
ccaaccctaaatttaatttt

SEQ ID NO: 59409 - DNA, 20 bp, Artificial Sequence
  chemically synthesized
cccaaccctaaatttaattt

SEQ ID NO: 59410 - DNA, 20 bp, Artificial Sequence
  chemically synthesized
ctttcccaaccctaaattta

SEQ ID NO: 59411 - DNA, 20 bp, Artificial Sequence
  chemically synthesized
cctttcccaaccctaaattt

SEQ ID NO: 59412 - DNA, 20 bp, Artificial Sequence
  chemically synthesized
tcctttcccaaccctaaatt

SEQ ID NO: 59413 - DNA, 20 bp, Artificial Sequence
  chemically synthesized
ttttcctttcccaaccctaa

SEQ ID NO: 59414 - DNA, 20 bp, Artificial Sequence
  chemically synthesized
taaaggtagaataaaagtaa

SEQ ID NO: 59415 - DNA, 20 bp, Artificial Sequence
  chemically synthesized
tcattgtaaaggtagaataa

SEQ ID NO: 59416 - DNA, 20 bp, Artificial Sequence
  chemically synthesized
aagaagtaacaaaggtatat

SEQ ID NO: 59417 - DNA, 20 bp, Artificial Sequence
  chemically synthesized
taatcaaacaagaaagcaaa

SEQ ID NO: 59418 - DNA, 20 bp, Artificial Sequence
  chemically synthesized
cccctaaaatgcattgtaat

SEQ ID NO: 59419 - DNA, 20 bp, Artificial Sequence
  chemically synthesized
acccctaaaatgcattgtaa

SEQ ID NO: 59420 - DNA, 20 bp, Artificial Sequence
  chemically synthesized
tacccctaaaatgcattgta

SEQ ID NO: 59421 - DNA, 20 bp, Artificial Sequence
  chemically synthesized
ccacacataaattttacccc

SEQ ID NO: 59422 - DNA, 20 bp, Artificial Sequence
  chemically synthesized
accacacataaattttaccc

SEQ ID NO: 59423 - DNA, 20 bp, Artificial Sequence
  chemically synthesized
taccacacataaattttacc

SEQ ID NO: 59424 - DNA, 20 bp, Artificial Sequence
  chemically synthesized
tgcattttaccacacataaa

SEQ ID NO: 59425 - DNA, 20 bp, Artificial Sequence
  chemically synthesized
gtgcattttaccacacataa

SEQ ID NO: 59426 - DNA, 20 bp, Artificial Sequence
  chemically synthesized
tgtgcattttaccacacata

SEQ ID NO: 59427 - DNA, 20 bp, Artificial Sequence
  chemically synthesized
ttgtgcattttaccacacat

SEQ ID NO: 59428 - DNA, 20 bp, Artificial Sequence
  chemically synthesized
atttttgtgcattttaccac

SEQ ID NO: 59429 - DNA, 20 bp, Artificial Sequence
  chemically synthesized
acttaatttttgtgcatttt

SEQ ID NO: 59430 - DNA, 20 bp, Artificial Sequence
  chemically synthesized
tccaaattcacttaattttt

SEQ ID NO: 59431 - DNA, 20 bp, Artificial Sequence
  chemically synthesized
ctccaaattcacttaatttt

SEQ ID NO: 59432 - DNA, 20 bp, Artificial Sequence
  chemically synthesized
gaatggctacaggtcataga

SEQ ID NO: 59433 - DNA, 20 bp, Artificial Sequence
  chemically synthesized
ccattggaatggctacaggt

SEQ ID NO: 59434 - DNA, 20 bp, Artificial Sequence
  chemically synthesized
accattggaatggctacagg

SEQ ID NO: 59435 - DNA, 20 bp, Artificial Sequence
  chemically synthesized
tatatctttaccattggaat

SEQ ID NO: 59436 - DNA, 20 bp, Artificial Sequence
  chemically synthesized
taggggaaaaataagttcta

SEQ ID NO: 59437 - DNA, 20 bp, Artificial Sequence
  chemically synthesized
actggaaaggaacatgaagc

SEQ ID NO: 59438 - DNA, 20 bp, Artificial Sequence
  chemically synthesized
ctcctggggtatgaagattg

SEQ ID NO: 59439 - DNA, 20 bp, Artificial Sequence
  chemically synthesized
tgattgctcctggggtatga

SEQ ID NO: 59440 - DNA, 20 bp, Artificial Sequence
  chemically synthesized
agaattatgattgctcctgg

SEQ ID NO: 59441 - DNA, 20 bp, Artificial Sequence
  chemically synthesized
ataagaactatcagaaactg

SEQ ID NO: 59442 - DNA, 20 bp, Artificial Sequence
  chemically synthesized
tattaataagaactatcaga

SEQ ID NO: 59443 - DNA, 20 bp, Artificial Sequence
  chemically synthesized
aatgaaagaagacagaaaag

SEQ ID NO: 59444 - DNA, 20 bp, Artificial Sequence
  chemically synthesized
aaaagatgagctatgagatg

SEQ ID NO: 59445 - DNA, 20 bp, Artificial Sequence
  chemically synthesized
gcaattgaaaagatgagcta

SEQ ID NO: 59446 - DNA, 20 bp, Artificial Sequence
  chemically synthesized
ctacttagcaattgaaaaga

SEQ ID NO: 59447 - DNA, 20 bp, Artificial Sequence
  chemically synthesized
atacagtggaattactactt

SEQ ID NO: 59448 - DNA, 20 bp, Artificial Sequence
  chemically synthesized
tggtatattcatacagtgga

SEQ ID NO: 59449 - DNA, 20 bp, Artificial Sequence
  chemically synthesized
gtggtatattcatacagtgg

SEQ ID NO: 59450 - DNA, 20 bp, Artificial Sequence
  chemically synthesized
aaaatttgtggtatattcat

SEQ ID NO: 59451 - DNA, 20 bp, Artificial Sequence
  chemically synthesized
atcaagaagagaaagaatta

SEQ ID NO: 59452 - DNA, 20 bp, Artificial Sequence
  chemically synthesized
aaaaaacacaaatgttcatc

SEQ ID NO: 59453 - DNA, 20 bp, Artificial Sequence
  chemically synthesized
tccaagaatgtgaacagcaa

SEQ ID NO: 59454 - DNA, 20 bp, Artificial Sequence
  chemically synthesized
gtccaagaatgtgaacagca

SEQ ID NO: 59455 - DNA, 20 bp, Artificial Sequence
  chemically synthesized
taccccagaaaaatgaaaat

SEQ ID NO: 59456 - DNA, 20 bp, Artificial Sequence
  chemically synthesized
ataccccagaaaaatgaaaa

SEQ ID NO: 59457 - DNA, 20 bp, Artificial Sequence
  chemically synthesized
tataccccagaaaaatgaaa

SEQ ID NO: 59458 - DNA, 20 bp, Artificial Sequence
  chemically synthesized
tgaggttttataccccagaa

SEQ ID NO: 59459 - DNA, 20 bp, Artificial Sequence
  chemically synthesized
cattctgaggttttataccc

SEQ ID NO: 59460 - DNA, 20 bp, Artificial Sequence
  chemically synthesized
tgacacagcaattccattct

SEQ ID NO: 59461 - DNA, 20 bp, Artificial Sequence
  chemically synthesized
ccttatgacacagcaattcc

SEQ ID NO: 59462 - DNA, 20 bp, Artificial Sequence
  chemically synthesized
gatacatgcttaccttatga

SEQ ID NO: 59463 - DNA, 20 bp, Artificial Sequence
  chemically synthesized
taaacttagatacatgctta

SEQ ID NO: 59464 - DNA, 20 bp, Artificial Sequence
  chemically synthesized
ttataaacttagatacatgc

SEQ ID NO: 59465 - DNA, 20 bp, Artificial Sequence
  chemically synthesized
cttataaacttagatacatg

SEQ ID NO: 59466 - DNA, 20 bp, Artificial Sequence
  chemically synthesized
ggcggtttcttataaactta

SEQ ID NO: 59467 - DNA, 20 bp, Artificial Sequence
  chemically synthesized
aaaaactgttgggcggtttc

SEQ ID NO: 59468 - DNA, 20 bp, Artificial Sequence
  chemically synthesized
gaaaaactgttgggcggttt

SEQ ID NO: 59469 - DNA, 20 bp, Artificial Sequence
  chemically synthesized
caaatgatgtatatctctca

SEQ ID NO: 59470 - DNA, 20 bp, Artificial Sequence
  chemically synthesized
aaaacctaacgagatactat

SEQ ID NO: 59471 - DNA, 20 bp, Artificial Sequence
  chemically synthesized
acaaatgcgaattaaaaacc

SEQ ID NO: 59472 - DNA, 20 bp, Artificial Sequence
  chemically synthesized
gacaaatgcgaattaaaaac

SEQ ID NO: 59473 - DNA, 20 bp, Artificial Sequence
  chemically synthesized
tttgacaaatgcgaattaaa

SEQ ID NO: 59474 - DNA, 20 bp, Artificial Sequence
  chemically synthesized
ttatttgacaaatgcgaatt

SEQ ID NO: 59475 - DNA, 20 bp, Artificial Sequence
  chemically synthesized
gttatttgacaaatgcgaat

SEQ ID NO: 59476 - DNA, 20 bp, Artificial Sequence
  chemically synthesized
acagatactagcccaaagaa

SEQ ID NO: 59477 - DNA, 20 bp, Artificial Sequence
  chemically synthesized
aacagatactagcccaaaga

SEQ ID NO: 59478 - DNA, 20 bp, Artificial Sequence
  chemically synthesized
taacagatactagcccaaag

SEQ ID NO: 59479 - DNA, 20 bp, Artificial Sequence
  chemically synthesized
agaatagaaaatagatgcaa

SEQ ID NO: 59480 - DNA, 20 bp, Artificial Sequence
  chemically synthesized
aaacgcaccagtaagaaaat

SEQ ID NO: 59481 - DNA, 20 bp, Artificial Sequence
  chemically synthesized
ttaaaacgcaccagtaagaa

SEQ ID NO: 59482 - DNA, 20 bp, Artificial Sequence
  chemically synthesized
cttattaaaacgcaccagta

SEQ ID NO: 59483 - DNA, 20 bp, Artificial Sequence
  chemically synthesized
gactccatcaaaataaaaaa

SEQ ID NO: 59484 - DNA, 20 bp, Artificial Sequence
  chemically synthesized
gcaaggatacaaaaagcact

SEQ ID NO: 59485 - DNA, 20 bp, Artificial Sequence
  chemically synthesized
tcttagcaaggatacaaaaa

SEQ ID NO: 59486 - DNA, 20 bp, Artificial Sequence
  chemically synthesized
ggagtaggcaaagttatctt

SEQ ID NO: 59487 - DNA, 20 bp, Artificial Sequence
  chemically synthesized
gggagtaggcaaagttatct

SEQ ID NO: 59488 - DNA, 20 bp, Artificial Sequence
  chemically synthesized
ccaactttgggagtaggcaa

SEQ ID NO: 59489 - DNA, 20 bp, Artificial Sequence
  chemically synthesized
aaagaaaacatgagaaaata

SEQ ID NO: 59490 - DNA, 20 bp, Artificial Sequence
  chemically synthesized
aaaagaaaacatgagaaaat

SEQ ID NO: 59491 - DNA, 20 bp, Artificial Sequence
  chemically synthesized
aaaaaactaaatataaaggc

SEQ ID NO: 59492 - DNA, 20 bp, Artificial Sequence
  chemically synthesized
aagtataataataattaaaa

SEQ ID NO: 59493 - DNA, 20 bp, Artificial Sequence
  chemically synthesized
tgcacatgtaccctagaact

SEQ ID NO: 59494 - DNA, 20 bp, Artificial Sequence
  chemically synthesized
atcggtgcagcacaccaaca

SEQ ID NO: 59495 - DNA, 20 bp, Artificial Sequence
  chemically synthesized
ggagatatacctaatgtaaa

SEQ ID NO: 59496 - DNA, 20 bp, Artificial Sequence
  chemically synthesized
gacacaggaaggggaacatc

SEQ ID NO: 59497 - DNA, 20 bp, Artificial Sequence
  chemically synthesized
aacgataagagcacttggac

SEQ ID NO: 59498 - DNA, 20 bp, Artificial Sequence
  chemically synthesized
tcactcatagatgggaattg

SEQ ID NO: 59499 - DNA, 20 bp, Artificial Sequence
  chemically synthesized
tcagcaaactatcacaagga

SEQ ID NO: 59500 - DNA, 20 bp, Artificial Sequence
  chemically synthesized
tagggacatggatgaagctg

SEQ ID NO: 59501 - DNA, 20 bp, Artificial Sequence
  chemically synthesized
atagggacatggatgaagct

SEQ ID NO: 59502 - DNA, 20 bp, Artificial Sequence
  chemically synthesized
atgtcctttatagggacatg

SEQ ID NO: 59503 - DNA, 20 bp, Artificial Sequence
  chemically synthesized
agaaaatgtggcacatatac

SEQ ID NO: 59504 - DNA, 20 bp, Artificial Sequence
  chemically synthesized
gaaccaagccaaatgtccat

SEQ ID NO: 59505 - DNA, 20 bp, Artificial Sequence
  chemically synthesized
acaatagcaaagacttggaa

SEQ ID NO: 59506 - DNA, 20 bp, Artificial Sequence
  chemically synthesized
cagcactattcacaatagca

SEQ ID NO: 59507 - DNA, 20 bp, Artificial Sequence
  chemically synthesized
ttgcagcactattcacaata

SEQ ID NO: 59508 - DNA, 20 bp, Artificial Sequence
  chemically synthesized
ctgggtatatacccaaagga

SEQ ID NO: 59509 - DNA, 20 bp, Artificial Sequence
  chemically synthesized
acccagccatcccattactg

SEQ ID NO: 59510 - DNA, 20 bp, Artificial Sequence
  chemically synthesized
gacccagccatcccattact

SEQ ID NO: 59511 - DNA, 20 bp, Artificial Sequence
  chemically synthesized
tggaagacagtgtggcgagt

SEQ ID NO: 59512 - DNA, 20 bp, Artificial Sequence
  chemically synthesized
aaccattgtggaagacagtg

SEQ ID NO: 59513 - DNA, 20 bp, Artificial Sequence
  chemically synthesized
gtgggactgtaaactagttc

SEQ ID NO: 59514 - DNA, 20 bp, Artificial Sequence
  chemically synthesized
cactgttggtgggactgtaa

SEQ ID NO: 59515 - DNA, 20 bp, Artificial Sequence
  chemically synthesized
acactgttggtgggactgta

SEQ ID NO: 59516 - DNA, 20 bp, Artificial Sequence
  chemically synthesized
tacactgttggtgggactgt

SEQ ID NO: 59517 - DNA, 20 bp, Artificial Sequence
  chemically synthesized
aaaagtcaggaaacaaaagg

SEQ ID NO: 59518 - DNA, 20 bp, Artificial Sequence
  chemically synthesized
gaatggtgatcattaaaaag

SEQ ID NO: 59519 - DNA, 20 bp, Artificial Sequence
  chemically synthesized
gccatcaatggccatcagag

SEQ ID NO: 59520 - DNA, 20 bp, Artificial Sequence
  chemically synthesized
tggatattagccatcaatgg

SEQ ID NO: 59521 - DNA, 20 bp, Artificial Sequence
  chemically synthesized
tagattctggatattagcca

SEQ ID NO: 59522 - DNA, 20 bp, Artificial Sequence
  chemically synthesized
attgtagattctggatatta

SEQ ID NO: 59523 - DNA, 20 bp, Artificial Sequence
  chemically synthesized
agttcattgtagattctgga

SEQ ID NO: 59524 - DNA, 20 bp, Artificial Sequence
  chemically synthesized
gagttcattgtagattctgg

SEQ ID NO: 59525 - DNA, 20 bp, Artificial Sequence
  chemically synthesized
tttgagttcattgtagattc

SEQ ID NO: 59526 - DNA, 20 bp, Artificial Sequence
  chemically synthesized
gtttgagttcattgtagatt

SEQ ID NO: 59527 - DNA, 20 bp, Artificial Sequence
  chemically synthesized
taaatttgtttgagttcatt

SEQ ID NO: 59528 - DNA, 20 bp, Artificial Sequence
  chemically synthesized
ttgtaaatttgtttgagttc

SEQ ID NO: 59529 - DNA, 20 bp, Artificial Sequence
  chemically synthesized
cttgtaaatttgtttgagtt

SEQ ID NO: 59530 - DNA, 20 bp, Artificial Sequence
  chemically synthesized
tcttgtaaatttgtttgagt

SEQ ID NO: 59531 - DNA, 20 bp, Artificial Sequence
  chemically synthesized
ttcttgtaaatttgtttgag

SEQ ID NO: 59532 - DNA, 20 bp, Artificial Sequence
  chemically synthesized
tttcttgtaaatttgtttga

SEQ ID NO: 59533 - DNA, 20 bp, Artificial Sequence
  chemically synthesized
ttttcttgtaaatttgtttg

SEQ ID NO: 59534 - DNA, 20 bp, Artificial Sequence
  chemically synthesized
tttttttcttgtaaatttgt

SEQ ID NO: 59535 - DNA, 20 bp, Artificial Sequence
  chemically synthesized
gtttttttcttgtaaatttg

SEQ ID NO: 59536 - DNA, 20 bp, Artificial Sequence
  chemically synthesized
tttgtttttttcttgtaaat

SEQ ID NO: 59537 - DNA, 20 bp, Artificial Sequence
  chemically synthesized
atggggttgtttgttttttt

SEQ ID NO: 59538 - DNA, 20 bp, Artificial Sequence
  chemically synthesized
gatggggttgtttgtttttt

SEQ ID NO: 59539 - DNA, 20 bp, Artificial Sequence
  chemically synthesized
tgatggggttgtttgttttt

SEQ ID NO: 59540 - DNA, 20 bp, Artificial Sequence
  chemically synthesized
ttgatggggttgtttgtttt

SEQ ID NO: 59541 - DNA, 20 bp, Artificial Sequence
  chemically synthesized
cccactttttgatggggttg

SEQ ID NO: 59542 - DNA, 20 bp, Artificial Sequence
  chemically synthesized
gcccactttttgatggggtt

SEQ ID NO: 59543 - DNA, 20 bp, Artificial Sequence
  chemically synthesized
atatcctttgcccacttttt

SEQ ID NO: 59544 - DNA, 20 bp, Artificial Sequence
  chemically synthesized
agaagtgtctgttcatatcc

SEQ ID NO: 59545 - DNA, 20 bp, Artificial Sequence
  chemically synthesized
gagaagtgtctgttcatatc

SEQ ID NO: 59546 - DNA, 20 bp, Artificial Sequence
  chemically synthesized
tgagaagtgtctgttcatat

SEQ ID NO: 59547 - DNA, 20 bp, Artificial Sequence
  chemically synthesized
ttttgagaagtgtctgttca

SEQ ID NO: 59548 - DNA, 20 bp, Artificial Sequence
  chemically synthesized
gctgcataaatgtcttcttt

SEQ ID NO: 59549 - DNA, 20 bp, Artificial Sequence
  chemically synthesized
ggctgcataaatgtcttctt

SEQ ID NO: 59550 - DNA, 20 bp, Artificial Sequence
  chemically synthesized
tggctgcataaatgtcttct

SEQ ID NO: 59551 - DNA, 20 bp, Artificial Sequence
  chemically synthesized
atgtgtcttttggctgcata

SEQ ID NO: 59552 - DNA, 20 bp, Artificial Sequence
  chemically synthesized
catgtgtcttttggctgcat

SEQ ID NO: 59553 - DNA, 20 bp, Artificial Sequence
  chemically synthesized
tcatgtgtcttttggctgca

SEQ ID NO: 59554 - DNA, 20 bp, Artificial Sequence
  chemically synthesized
ttcatgtgtcttttggctgc

SEQ ID NO: 59555 - DNA, 20 bp, Artificial Sequence
  chemically synthesized
tttcatgtgtcttttggctg

SEQ ID NO: 59556 - DNA, 20 bp, Artificial Sequence
  chemically synthesized
atgatgagcattttttcatg

SEQ ID NO: 59557 - DNA, 20 bp, Artificial Sequence
  chemically synthesized
tctgatggccattgatgatg

SEQ ID NO: 59558 - DNA, 20 bp, Artificial Sequence
  chemically synthesized
ctctgatggccattgatgat

SEQ ID NO: 59559 - DNA, 20 bp, Artificial Sequence
  chemically synthesized
cgtttctctgatggccattg

SEQ ID NO: 59560 - DNA, 20 bp, Artificial Sequence
  chemically synthesized
gcgtttctctgatggccatt

SEQ ID NO: 59561 - DNA, 20 bp, Artificial Sequence
  chemically synthesized
atttgcgtttctctgatggc

SEQ ID NO: 59562 - DNA, 20 bp, Artificial Sequence
  chemically synthesized
gatttgcgtttctctgatgg

SEQ ID NO: 59563 - DNA, 20 bp, Artificial Sequence
  chemically synthesized
gccaatgcataagacaagag

SEQ ID NO: 59564 - DNA, 20 bp, Artificial Sequence
  chemically synthesized
agccaatgcataagacaaga

SEQ ID NO: 59565 - DNA, 20 bp, Artificial Sequence
  chemically synthesized
tagccaatgcataagacaag

SEQ ID NO: 59566 - DNA, 20 bp, Artificial Sequence
  chemically synthesized
agtggtgtacaggaggtttt

SEQ ID NO: 59567 - DNA, 20 bp, Artificial Sequence
  chemically synthesized
tattcagtggtgtacaggag

SEQ ID NO: 59568 - DNA, 20 bp, Artificial Sequence
  chemically synthesized
ctattcagtggtgtacagga

SEQ ID NO: 59569 - DNA, 20 bp, Artificial Sequence
  chemically synthesized
accatttctattcagtggtg

SEQ ID NO: 59570 - DNA, 20 bp, Artificial Sequence
  chemically synthesized
caccatttctattcagtggt

SEQ ID NO: 59571 - DNA, 20 bp, Artificial Sequence
  chemically synthesized
cctaagaccaggacacgaca

SEQ ID NO: 59572 - DNA, 20 bp, Artificial Sequence
  chemically synthesized
ccctaagaccaggacacgac

SEQ ID NO: 59573 - DNA, 20 bp, Artificial Sequence
  chemically synthesized
tttccctaagaccaggacac

SEQ ID NO: 59574 - DNA, 20 bp, Artificial Sequence
  chemically synthesized
tgaacatgaattgtttccct

SEQ ID NO: 59575 - DNA, 20 bp, Artificial Sequence
  chemically synthesized
gtgctgaaattgtgaacatg

SEQ ID NO: 59576 - DNA, 20 bp, Artificial Sequence
  chemically synthesized
agtgctgaaattgtgaacat

SEQ ID NO: 59577 - DNA, 20 bp, Artificial Sequence
  chemically synthesized
atatcatatttagtgctgaa

SEQ ID NO: 59578 - DNA, 20 bp, Artificial Sequence
  chemically synthesized
caaaagcctatagttaatat

SEQ ID NO: 59579 - DNA, 20 bp, Artificial Sequence
  chemically synthesized
acaaaagcctatagttaata

SEQ ID NO: 59580 - DNA, 20 bp, Artificial Sequence
  chemically synthesized
ctcaatctgataaagagcat

SEQ ID NO: 59581 - DNA, 20 bp, Artificial Sequence
  chemically synthesized
aaaactcacagcaaataaga

SEQ ID NO: 59582 - DNA, 20 bp, Artificial Sequence
  chemically synthesized
atgttaaaaactcacagcaa

SEQ ID NO: 59583 - DNA, 20 bp, Artificial Sequence
  chemically synthesized
ataacatgaatgcatctatt

SEQ ID NO: 59584 - DNA, 20 bp, Artificial Sequence
  chemically synthesized
aataacatgaatgcatctat

SEQ ID NO: 59585 - DNA, 20 bp, Artificial Sequence
  chemically synthesized
aaagcataatttaataacat

SEQ ID NO: 59586 - DNA, 20 bp, Artificial Sequence
  chemically synthesized
taatcaatcaatgcattcaa

SEQ ID NO: 59587 - DNA, 20 bp, Artificial Sequence
  chemically synthesized
acagactagaagacataaat

SEQ ID NO: 59588 - DNA, 20 bp, Artificial Sequence
  chemically synthesized
ccatgttaacagactagaag

SEQ ID NO: 59589 - DNA, 20 bp, Artificial Sequence
  chemically synthesized
gccatgttaacagactagaa

SEQ ID NO: 59590 - DNA, 20 bp, Artificial Sequence
  chemically synthesized
atcaatataatttgccatgt

SEQ ID NO: 59591 - DNA, 20 bp, Artificial Sequence
  chemically synthesized
aaaaattaatcaatataatt

SEQ ID NO: 59592 - DNA, 20 bp, Artificial Sequence
  chemically synthesized
aagattcaaaaattaatcaa

SEQ ID NO: 59593 - DNA, 20 bp, Artificial Sequence
  chemically synthesized
taaagtagggcacatctcag

SEQ ID NO: 59594 - DNA, 20 bp, Artificial Sequence
  chemically synthesized
atacataattataaagtagg

SEQ ID NO: 59595 - DNA, 20 bp, Artificial Sequence
  chemically synthesized
aatacataattataaagtag

SEQ ID NO: 59596 - DNA, 20 bp, Artificial Sequence
  chemically synthesized
taatacataattataaagta

SEQ ID NO: 59597 - DNA, 20 bp, Artificial Sequence
  chemically synthesized
acaagaaaatactaacacac

SEQ ID NO: 59598 - DNA, 20 bp, Artificial Sequence
  chemically synthesized
cacaagaaaatactaacaca

SEQ ID NO: 59599 - DNA, 20 bp, Artificial Sequence
  chemically synthesized
atagacaaatatccctcaaa

SEQ ID NO: 59600 - DNA, 20 bp, Artificial Sequence
  chemically synthesized
gagaaaagaagttgatagac

SEQ ID NO: 59601 - DNA, 20 bp, Artificial Sequence
  chemically synthesized
atcctggtacccaaacctgg

SEQ ID NO: 59602 - DNA, 20 bp, Artificial Sequence
  chemically synthesized
aagctagcttaatcctggta

SEQ ID NO: 59603 - DNA, 20 bp, Artificial Sequence
  chemically synthesized
gaagctagcttaatcctggt

SEQ ID NO: 59604 - DNA, 20 bp, Artificial Sequence
  chemically synthesized
tgaagctagcttaatcctgg

SEQ ID NO: 59605 - DNA, 20 bp, Artificial Sequence
  chemically synthesized
ttgaagctagcttaatcctg

SEQ ID NO: 59606 - DNA, 20 bp, Artificial Sequence
  chemically synthesized
tttgaagctagcttaatcct

SEQ ID NO: 59607 - DNA, 20 bp, Artificial Sequence
  chemically synthesized
tcaacctattttttgaagct

SEQ ID NO: 59608 - DNA, 20 bp, Artificial Sequence
  chemically synthesized
gaaactggaagaggaatgac

SEQ ID NO: 59609 - DNA, 20 bp, Artificial Sequence
  chemically synthesized
agaaactggaagaggaatga

SEQ ID NO: 59610 - DNA, 20 bp, Artificial Sequence
  chemically synthesized
tagaaactggaagaggaatg

SEQ ID NO: 59611 - DNA, 20 bp, Artificial Sequence
  chemically synthesized
ttttagaaactggaagagga

SEQ ID NO: 59612 - DNA, 20 bp, Artificial Sequence
  chemically synthesized
tatcaaatgtataaggaaag

SEQ ID NO: 59613 - DNA, 20 bp, Artificial Sequence
  chemically synthesized
tggtaaattctatcaaatgt

SEQ ID NO: 59614 - DNA, 20 bp, Artificial Sequence
  chemically synthesized
tattctggtaaattctatca

SEQ ID NO: 59615 - DNA, 20 bp, Artificial Sequence
  chemically synthesized
atggttatattctggtaaat

SEQ ID NO: 59616 - DNA, 20 bp, Artificial Sequence
  chemically synthesized
cccccaaagaaaactctatg

SEQ ID NO: 59617 - DNA, 20 bp, Artificial Sequence
  chemically synthesized
tcaataaacttccccccaaa

SEQ ID NO: 59618 - DNA, 20 bp, Artificial Sequence
  chemically synthesized
ttatcaataaacttcccccc

SEQ ID NO: 59619 - DNA, 20 bp, Artificial Sequence
  chemically synthesized
aacttattatcaataaactt

SEQ ID NO: 59620 - DNA, 20 bp, Artificial Sequence
  chemically synthesized
tctcaaagaaattaaactta

SEQ ID NO: 59621 - DNA, 20 bp, Artificial Sequence
  chemically synthesized
ctctcaaagaaattaaactt

SEQ ID NO: 59622 - DNA, 20 bp, Artificial Sequence
  chemically synthesized
tatttctctcaaagaaatta

SEQ ID NO: 59623 - DNA, 20 bp, Artificial Sequence
  chemically synthesized
aacagttatatttctctcaa

SEQ ID NO: 59624 - DNA, 20 bp, Artificial Sequence
  chemically synthesized
caacagttatatttctctca

SEQ ID NO: 59625 - DNA, 20 bp, Artificial Sequence
  chemically synthesized
gtaaatctgacccacataga

SEQ ID NO: 59626 - DNA, 20 bp, Artificial Sequence
  chemically synthesized
taaacacaaattagtaaatc

SEQ ID NO: 59627 - DNA, 20 bp, Artificial Sequence
  chemically synthesized
ataaacacaaattagtaaat

SEQ ID NO: 59628 - DNA, 20 bp, Artificial Sequence
  chemically synthesized
tataaacacaaattagtaaa

SEQ ID NO: 59629 - DNA, 20 bp, Artificial Sequence
  chemically synthesized
ttataaacacaaattagtaa

SEQ ID NO: 59630 - DNA, 20 bp, Artificial Sequence
  chemically synthesized
gatgtaatgaaaatgttttt

SEQ ID NO: 59631 - DNA, 20 bp, Artificial Sequence
  chemically synthesized
atgtatataataacttagat

SEQ ID NO: 59632 - DNA, 20 bp, Artificial Sequence
  chemically synthesized
aatgtatataataacttaga

SEQ ID NO: 59633 - DNA, 20 bp, Artificial Sequence
  chemically synthesized
taatgtatataataacttag

SEQ ID NO: 59634 - DNA, 20 bp, Artificial Sequence
  chemically synthesized
aatgctattttaatgtatat

SEQ ID NO: 59635 - DNA, 20 bp, Artificial Sequence
  chemically synthesized
aaatgctattttaatgtata

SEQ ID NO: 59636 - DNA, 20 bp, Artificial Sequence
  chemically synthesized
taaatgctattttaatgtat

SEQ ID NO: 59637 - DNA, 20 bp, Artificial Sequence
  chemically synthesized
aaagtataataaggaaattt

SEQ ID NO: 59638 - DNA, 20 bp, Artificial Sequence
  chemically synthesized
ctaatatctggaatgtaaga

SEQ ID NO: 59639 - DNA, 20 bp, Artificial Sequence
  chemically synthesized
agaaaacaaaatatataaat

SEQ ID NO: 59640 - DNA, 20 bp, Artificial Sequence
  chemically synthesized
gctggtgaaccctaacaaga

SEQ ID NO: 59641 - DNA, 20 bp, Artificial Sequence
  chemically synthesized
ggctggtgaaccctaacaag

SEQ ID NO: 59642 - DNA, 20 bp, Artificial Sequence
  chemically synthesized
tggctggtgaaccctaacaa

SEQ ID NO: 59643 - DNA, 20 bp, Artificial Sequence
  chemically synthesized
taggtaattttggctggtga

SEQ ID NO: 59644 - DNA, 20 bp, Artificial Sequence
  chemically synthesized
ataggtaattttggctggtg

SEQ ID NO: 59645 - DNA, 20 bp, Artificial Sequence
  chemically synthesized
tataggtaattttggctggt

SEQ ID NO: 59646 - DNA, 20 bp, Artificial Sequence
  chemically synthesized
ttataggtaattttggctgg

SEQ ID NO: 59647 - DNA, 20 bp, Artificial Sequence
  chemically synthesized
atgggtaacgtaatggattt

SEQ ID NO: 59648 - DNA, 20 bp, Artificial Sequence
  chemically synthesized
tatacataatatcacatata

SEQ ID NO: 59649 - DNA, 20 bp, Artificial Sequence
  chemically synthesized
aagaaaatgataacatagta

SEQ ID NO: 59650 - DNA, 20 bp, Artificial Sequence
  chemically synthesized
aaaaaagtgttaaagaaaat

SEQ ID NO: 59651 - DNA, 20 bp, Artificial Sequence
  chemically synthesized
attaaaaaaagtgttaaaga

SEQ ID NO: 59652 - DNA, 20 bp, Artificial Sequence
  chemically synthesized
cataggaatatatgtaagaa

SEQ ID NO: 59653 - DNA, 20 bp, Artificial Sequence
  chemically synthesized
atgttccataggaatatatg

SEQ ID NO: 59654 - DNA, 20 bp, Artificial Sequence
  chemically synthesized
gatgttccataggaatatat

SEQ ID NO: 59655 - DNA, 20 bp, Artificial Sequence
  chemically synthesized
tgatgttccataggaatata

SEQ ID NO: 59656 - DNA, 20 bp, Artificial Sequence
  chemically synthesized
ttgatgttccataggaatat

SEQ ID NO: 59657 - DNA, 20 bp, Artificial Sequence
  chemically synthesized
tttgatgttccataggaata

SEQ ID NO: 59658 - DNA, 20 bp, Artificial Sequence
  chemically synthesized
ttttgatgttccataggaat

SEQ ID NO: 59659 - DNA, 20 bp, Artificial Sequence
  chemically synthesized
ctttttttgatgttccatag

SEQ ID NO: 59660 - DNA, 20 bp, Artificial Sequence
  chemically synthesized
aaaagtaattgctttttttg

SEQ ID NO: 59661 - DNA, 20 bp, Artificial Sequence
  chemically synthesized
gattaaaaagtaattgcttt

SEQ ID NO: 59662 - DNA, 20 bp, Artificial Sequence
  chemically synthesized
agattaaaaagtaattgctt

SEQ ID NO: 59663 - DNA, 20 bp, Artificial Sequence
  chemically synthesized
tttagattaaaaagtaattg

SEQ ID NO: 59664 - DNA, 20 bp, Artificial Sequence
  chemically synthesized
gtttagattaaaaagtaatt

SEQ ID NO: 59665 - DNA, 20 bp, Artificial Sequence
  chemically synthesized
atcactgaaaaacaaatact

SEQ ID NO: 59666 - DNA, 20 bp, Artificial Sequence
  chemically synthesized
taattgatcactgaaaaaca

SEQ ID NO: 59667 - DNA, 20 bp, Artificial Sequence
  chemically synthesized
ataattgatcactgaaaaac

SEQ ID NO: 59668 - DNA, 20 bp, Artificial Sequence
  chemically synthesized
tataattgatcactgaaaaa

SEQ ID NO: 59669 - DNA, 20 bp, Artificial Sequence
  chemically synthesized
ttataattgatcactgaaaa

SEQ ID NO: 59670 - DNA, 20 bp, Artificial Sequence
  chemically synthesized
tatatttttataattgatca

SEQ ID NO: 59671 - DNA, 20 bp, Artificial Sequence
  chemically synthesized
ctatatttttataattgatc

SEQ ID NO: 59672 - DNA, 20 bp, Artificial Sequence
  chemically synthesized
tgggaaatttctatattttt

SEQ ID NO: 59673 - DNA, 20 bp, Artificial Sequence
  chemically synthesized
taaaattatgggaaatttct

SEQ ID NO: 59674 - DNA, 20 bp, Artificial Sequence
  chemically synthesized
ataaaattatgggaaatttc

SEQ ID NO: 59675 - DNA, 20 bp, Artificial Sequence
  chemically synthesized
aacctgaaatagtcaagaca

SEQ ID NO: 59676 - DNA, 20 bp, Artificial Sequence
  chemically synthesized
gatgcaattgaacctgaaat

SEQ ID NO: 59677 - DNA, 20 bp, Artificial Sequence
  chemically synthesized
gaattagatgcaattgaacc

SEQ ID NO: 59678 - DNA, 20 bp, Artificial Sequence
  chemically synthesized
cttagaattagatgcaattg

SEQ ID NO: 59679 - DNA, 20 bp, Artificial Sequence
  chemically synthesized
acttagaattagatgcaatt

SEQ ID NO: 59680 - DNA, 20 bp, Artificial Sequence
  chemically synthesized
gtgatgatttacttagaatt

SEQ ID NO: 59681 - DNA, 20 bp, Artificial Sequence
  chemically synthesized
tgctgctatgatacttagtg

SEQ ID NO: 59682 - DNA, 20 bp, Artificial Sequence
  chemically synthesized
ctgctgctatgatacttagt

SEQ ID NO: 59683 - DNA, 20 bp, Artificial Sequence
  chemically synthesized
tggctttctgctgctatgat

SEQ ID NO: 59684 - DNA, 20 bp, Artificial Sequence
  chemically synthesized
aaatcttatggctttctgct

SEQ ID NO: 59685 - DNA, 20 bp, Artificial Sequence
  chemically synthesized
aggaatgagagataatgaat

SEQ ID NO: 59686 - DNA, 20 bp, Artificial Sequence
  chemically synthesized
ataggtatgtgggtgggtga

SEQ ID NO: 59687 - DNA, 20 bp, Artificial Sequence
  chemically synthesized
actctgttcataggtatgtg

SEQ ID NO: 59688 - DNA, 20 bp, Artificial Sequence
  chemically synthesized
aactctgttcataggtatgt

SEQ ID NO: 59689 - DNA, 20 bp, Artificial Sequence
  chemically synthesized
actttaactctgttcatagg

SEQ ID NO: 59690 - DNA, 20 bp, Artificial Sequence
  chemically synthesized
gactttaactctgttcatag

SEQ ID NO: 59691 - DNA, 20 bp, Artificial Sequence
  chemically synthesized
atgtatgtttgactttaact

SEQ ID NO: 59692 - DNA, 20 bp, Artificial Sequence
  chemically synthesized
ctgtatgcagtggaatagta

SEQ ID NO: 59693 - DNA, 20 bp, Artificial Sequence
  chemically synthesized
aggtaggagttcctgtatgc

SEQ ID NO: 59694 - DNA, 20 bp, Artificial Sequence
  chemically synthesized
attcaggtaggagttcctgt

SEQ ID NO: 59695 - DNA, 20 bp, Artificial Sequence
  chemically synthesized
cctccacgagggccccactg

SEQ ID NO: 59696 - DNA, 20 bp, Artificial Sequence
  chemically synthesized
acctccacgagggccccact

SEQ ID NO: 59697 - DNA, 20 bp, Artificial Sequence
  chemically synthesized
aggcactttacctccacgag

SEQ ID NO: 59698 - DNA, 20 bp, Artificial Sequence
  chemically synthesized
ctgaaattcaggcactttac

SEQ ID NO: 59699 - DNA, 20 bp, Artificial Sequence
  chemically synthesized
cctgaaattcaggcacttta

SEQ ID NO: 59700 - DNA, 20 bp, Artificial Sequence
  chemically synthesized
tagtttcctgaaattcaggc

SEQ ID NO: 59701 - DNA, 20 bp, Artificial Sequence
  chemically synthesized
tctcgatgaaatatatctct

SEQ ID NO: 59702 - DNA, 20 bp, Artificial Sequence
  chemically synthesized
gtctcgatgaaatatatctc

SEQ ID NO: 59703 - DNA, 20 bp, Artificial Sequence
  chemically synthesized
tttgtctcgatgaaatatat

SEQ ID NO: 59704 - DNA, 20 bp, Artificial Sequence
  chemically synthesized
ctttgtctcgatgaaatata

SEQ ID NO: 59705 - DNA, 20 bp, Artificial Sequence
  chemically synthesized
caatcagtaagaatttcttt

SEQ ID NO: 59706 - DNA, 20 bp, Artificial Sequence
  chemically synthesized
ccaatcagtaagaatttctt

SEQ ID NO: 59707 - DNA, 20 bp, Artificial Sequence
  chemically synthesized
ctctttccaatcagtaagaa

SEQ ID NO: 59708 - DNA, 20 bp, Artificial Sequence
  chemically synthesized
acacatatattgctctttcc

SEQ ID NO: 59709 - DNA, 20 bp, Artificial Sequence
  chemically synthesized
tccaaccttcacacatatat

SEQ ID NO: 59710 - DNA, 20 bp, Artificial Sequence
  chemically synthesized
ctccaaccttcacacatata

SEQ ID NO: 59711 - DNA, 20 bp, Artificial Sequence
  chemically synthesized
tctccaaccttcacacatat

SEQ ID NO: 59712 - DNA, 20 bp, Artificial Sequence
  chemically synthesized
gactcttttctccaaccttc

SEQ ID NO: 59713 - DNA, 20 bp, Artificial Sequence
  chemically synthesized
caggttagactcttttctcc

SEQ ID NO: 59714 - DNA, 20 bp, Artificial Sequence
  chemically synthesized
gcaggttagactcttttctc

SEQ ID NO: 59715 - DNA, 20 bp, Artificial Sequence
  chemically synthesized
tgcaggttagactcttttct

SEQ ID NO: 59716 - DNA, 20 bp, Artificial Sequence
  chemically synthesized
ttgcaggttagactcttttc

SEQ ID NO: 59717 - DNA, 20 bp, Artificial Sequence
  chemically synthesized
tttgcaggttagactctttt

SEQ ID NO: 59718 - DNA, 20 bp, Artificial Sequence
  chemically synthesized
ttttgcaggttagactcttt

SEQ ID NO: 59719 - DNA, 20 bp, Artificial Sequence
  chemically synthesized
ggtctatttttttgcaggtt

SEQ ID NO: 59720 - DNA, 20 bp, Artificial Sequence
  chemically synthesized
cctatagtggttaggtctat

SEQ ID NO: 59721 - DNA, 20 bp, Artificial Sequence
  chemically synthesized
ttacctatagtggttaggtc

SEQ ID NO: 59722 - DNA, 20 bp, Artificial Sequence
  chemically synthesized
tatacaacttcttacctata

SEQ ID NO: 59723 - DNA, 20 bp, Artificial Sequence
  chemically synthesized
atatacaacttcttacctat

SEQ ID NO: 59724 - DNA, 20 bp, Artificial Sequence
  chemically synthesized
tatatacaacttcttaccta

SEQ ID NO: 59725 - DNA, 20 bp, Artificial Sequence
  chemically synthesized
aggtagcccaaaagtgacaa

SEQ ID NO: 59726 - DNA, 20 bp, Artificial Sequence
  chemically synthesized
caggtagcccaaaagtgaca

SEQ ID NO: 59727 - DNA, 20 bp, Artificial Sequence
  chemically synthesized
tcaggtagcccaaaagtgac

SEQ ID NO: 59728 - DNA, 20 bp, Artificial Sequence
  chemically synthesized
acctacagaatgtccagaca

SEQ ID NO: 59729 - DNA, 20 bp, Artificial Sequence
  chemically synthesized
aacctacagaatgtccagac

SEQ ID NO: 59730 - DNA, 20 bp, Artificial Sequence
  chemically synthesized
taacctacagaatgtccaga

SEQ ID NO: 59731 - DNA, 20 bp, Artificial Sequence
  chemically synthesized
tctacttttaacctacagaa

SEQ ID NO: 59732 - DNA, 20 bp, Artificial Sequence
  chemically synthesized
gtctacttttaacctacaga

SEQ ID NO: 59733 - DNA, 20 bp, Artificial Sequence
  chemically synthesized
cactatttgtctacttttaa

SEQ ID NO: 59734 - DNA, 20 bp, Artificial Sequence
  chemically synthesized
ccactatttgtctactttta

SEQ ID NO: 59735 - DNA, 20 bp, Artificial Sequence
  chemically synthesized
tttccactatttgtctactt

SEQ ID NO: 59736 - DNA, 20 bp, Artificial Sequence
  chemically synthesized
ccagttgtttccactatttg

SEQ ID NO: 59737 - DNA, 20 bp, Artificial Sequence
  chemically synthesized
tctattgccagttgtttcca

SEQ ID NO: 59738 - DNA, 20 bp, Artificial Sequence
  chemically synthesized
gctattatctattgccagtt

SEQ ID NO: 59739 - DNA, 20 bp, Artificial Sequence
  chemically synthesized
cagtagggaattagctatta

SEQ ID NO: 59740 - DNA, 20 bp, Artificial Sequence
  chemically synthesized
acagtagggaattagctatt

SEQ ID NO: 59741 - DNA, 20 bp, Artificial Sequence
  chemically synthesized
taaaaatttacagtagggaa

SEQ ID NO: 59742 - DNA, 20 bp, Artificial Sequence
  chemically synthesized
ttataaaaatttacagtagg

SEQ ID NO: 59743 - DNA, 20 bp, Artificial Sequence
  chemically synthesized
attataaaaatttacagtag

SEQ ID NO: 59744 - DNA, 20 bp, Artificial Sequence
  chemically synthesized
atttattataaaaatttaca

SEQ ID NO: 59745 - DNA, 20 bp, Artificial Sequence
  chemically synthesized
catttattataaaaatttac

SEQ ID NO: 59746 - DNA, 20 bp, Artificial Sequence
  chemically synthesized
tcatttattataaaaattta

SEQ ID NO: 59747 - DNA, 20 bp, Artificial Sequence
  chemically synthesized
aagcttttcatttattataa

SEQ ID NO: 59748 - DNA, 20 bp, Artificial Sequence
  chemically synthesized
caagcttttcatttattata

SEQ ID NO: 59749 - DNA, 20 bp, Artificial Sequence
  chemically synthesized
actgcaggaaagtataaatt

SEQ ID NO: 59750 - DNA, 20 bp, Artificial Sequence
  chemically synthesized
cactgcaggaaagtataaat

SEQ ID NO: 59751 - DNA, 20 bp, Artificial Sequence
  chemically synthesized
tttcactgcaggaaagtata

SEQ ID NO: 59752 - DNA, 20 bp, Artificial Sequence
  chemically synthesized
aagatcctcagaattctttc

SEQ ID NO: 59753 - DNA, 20 bp, Artificial Sequence
  chemically synthesized
gaagatcctcagaattcttt

SEQ ID NO: 59754 - DNA, 20 bp, Artificial Sequence
  chemically synthesized
acacctgggtttgaagatcc

SEQ ID NO: 59755 - DNA, 20 bp, Artificial Sequence
  chemically synthesized
cacacctgggtttgaagatc

SEQ ID NO: 59756 - DNA, 20 bp, Artificial Sequence
  chemically synthesized
cacaaacactatctttcaca

SEQ ID NO: 59757 - DNA, 20 bp, Artificial Sequence
  chemically synthesized
gcacaaacactatctttcac

SEQ ID NO: 59758 - DNA, 20 bp, Artificial Sequence
  chemically synthesized
atgtaggtttgcacaaacac

SEQ ID NO: 59759 - DNA, 20 bp, Artificial Sequence
  chemically synthesized
gccacttcatgtaggtttgc

SEQ ID NO: 59760 - DNA, 20 bp, Artificial Sequence
  chemically synthesized
ggagaaggacaggtaaggaa

SEQ ID NO: 59761 - DNA, 20 bp, Artificial Sequence
  chemically synthesized
gggagaaggacaggtaagga

SEQ ID NO: 59762 - DNA, 20 bp, Artificial Sequence
  chemically synthesized
gggagaagaccacaaggaat

SEQ ID NO: 59763 - DNA, 20 bp, Artificial Sequence
  chemically synthesized
ggggagaagaccacaaggaa

SEQ ID NO: 59764 - DNA, 20 bp, Artificial Sequence
  chemically synthesized
tggggatttggggagaagac

SEQ ID NO: 59765 - DNA, 20 bp, Artificial Sequence
  chemically synthesized
ctcagaatgttgtggggatt

SEQ ID NO: 59766 - DNA, 20 bp, Artificial Sequence
  chemically synthesized
gctaaacttactcagaatgt

SEQ ID NO: 59767 - DNA, 20 bp, Artificial Sequence
  chemically synthesized
ataagttagctaaacttact

SEQ ID NO: 59768 - DNA, 20 bp, Artificial Sequence
  chemically synthesized
aaataacttgataagttagc

SEQ ID NO: 59769 - DNA, 20 bp, Artificial Sequence
  chemically synthesized
aaaataacttgataagttag

SEQ ID NO: 59770 - DNA, 20 bp, Artificial Sequence
  chemically synthesized
taaaataacttgataagtta

SEQ ID NO: 59771 - DNA, 20 bp, Artificial Sequence
  chemically synthesized
ttaaaataacttgataagtt

SEQ ID NO: 59772 - DNA, 20 bp, Artificial Sequence
  chemically synthesized
tagaaaactctgactaatag

SEQ ID NO: 59773 - DNA, 20 bp, Artificial Sequence
  chemically synthesized
gtagaaaactctgactaata

SEQ ID NO: 59774 - DNA, 20 bp, Artificial Sequence
  chemically synthesized
tgtagaaaactctgactaat

SEQ ID NO: 59775 - DNA, 20 bp, Artificial Sequence
  chemically synthesized
ttgtagaaaactctgactaa

SEQ ID NO: 59776 - DNA, 20 bp, Artificial Sequence
  chemically synthesized
tttgtagaaaactctgacta

SEQ ID NO: 59777 - DNA, 20 bp, Artificial Sequence
  chemically synthesized
ttttgtagaaaactctgact

SEQ ID NO: 59778 - DNA, 20 bp, Artificial Sequence
  chemically synthesized
tttttgtagaaaactctgac

SEQ ID NO: 59779 - DNA, 20 bp, Artificial Sequence
  chemically synthesized
ttttttgtagaaaactctga

SEQ ID NO: 59780 - DNA, 20 bp, Artificial Sequence
  chemically synthesized
tttttttgtagaaaactctg

SEQ ID NO: 59781 - DNA, 20 bp, Artificial Sequence
  chemically synthesized
ccttttttttttgtagaaaa

SEQ ID NO: 59782 - DNA, 20 bp, Artificial Sequence
  chemically synthesized
attcccttttttttttgtag

SEQ ID NO: 59783 - DNA, 20 bp, Artificial Sequence
  chemically synthesized
atagaaatctctcctatcaa

SEQ ID NO: 59784 - DNA, 20 bp, Artificial Sequence
  chemically synthesized
ttaatagaaatctctcctat

SEQ ID NO: 59785 - DNA, 20 bp, Artificial Sequence
  chemically synthesized
cttaatagaaatctctccta

SEQ ID NO: 59786 - DNA, 20 bp, Artificial Sequence
  chemically synthesized
ccacaaccacaaaagtcaat

SEQ ID NO: 59787 - DNA, 20 bp, Artificial Sequence
  chemically synthesized
ccagttcccacaaccacaaa

SEQ ID NO: 59788 - DNA, 20 bp, Artificial Sequence
  chemically synthesized
cgattgccagttcccacaac

SEQ ID NO: 59789 - DNA, 20 bp, Artificial Sequence
  chemically synthesized
gcgattgccagttcccacaa

SEQ ID NO: 59790 - DNA, 20 bp, Artificial Sequence
  chemically synthesized
tgcgattgccagttcccaca

SEQ ID NO: 59791 - DNA, 20 bp, Artificial Sequence
  chemically synthesized
ttgcgattgccagttcccac

SEQ ID NO: 59792 - DNA, 20 bp, Artificial Sequence
  chemically synthesized
tggatttttgcgattgccag

SEQ ID NO: 59793 - DNA, 20 bp, Artificial Sequence
  chemically synthesized
ccttatggatttttgcgatt

SEQ ID NO: 59794 - DNA, 20 bp, Artificial Sequence
  chemically synthesized
tagcctactggcttgcctta

SEQ ID NO: 59795 - DNA, 20 bp, Artificial Sequence
  chemically synthesized
ctagcctactggcttgcctt

SEQ ID NO: 59796 - DNA, 20 bp, Artificial Sequence
  chemically synthesized
ctgaatttctagcctactgg

SEQ ID NO: 59797 - DNA, 20 bp, Artificial Sequence
  chemically synthesized
cctgaatttctagcctactg

SEQ ID NO: 59798 - DNA, 20 bp, Artificial Sequence
  chemically synthesized
ggctcaatactgcactcttt

SEQ ID NO: 59799 - DNA, 20 bp, Artificial Sequence
  chemically synthesized
aggctcaatactgcactctt

SEQ ID NO: 59800 - DNA, 20 bp, Artificial Sequence
  chemically synthesized
ccctgcggaatttaggctca

SEQ ID NO: 59801 - DNA, 20 bp, Artificial Sequence
  chemically synthesized
ttgccctgcggaatttaggc

SEQ ID NO: 59802 - DNA, 20 bp, Artificial Sequence
  chemically synthesized
cttgccctgcggaatttagg

SEQ ID NO: 59803 - DNA, 20 bp, Artificial Sequence
  chemically synthesized
agtttcttgccctgcggaat

SEQ ID NO: 59804 - DNA, 20 bp, Artificial Sequence
  chemically synthesized
cctgaagaagaagcaagtct

SEQ ID NO: 59805 - DNA, 20 bp, Artificial Sequence
  chemically synthesized
cgtgatgtggtgggcatcac

SEQ ID NO: 59806 - DNA, 20 bp, Artificial Sequence
  chemically synthesized
ccttccgtgatgtggtgggc

SEQ ID NO: 59807 - DNA, 20 bp, Artificial Sequence
  chemically synthesized
agtaaagtagattgccttcc

SEQ ID NO: 59808 - DNA, 20 bp, Artificial Sequence
  chemically synthesized
gagtaaagtagattgccttc

SEQ ID NO: 59809 - DNA, 20 bp, Artificial Sequence
  chemically synthesized
aatcagtaaactttgagtaa

SEQ ID NO: 59810 - DNA, 20 bp, Artificial Sequence
  chemically synthesized
aaatcagtaaactttgagta

SEQ ID NO: 59811 - DNA, 20 bp, Artificial Sequence
  chemically synthesized
acatttaaatcagtaaactt

SEQ ID NO: 59812 - DNA, 20 bp, Artificial Sequence
  chemically synthesized
agacatggttaacatttaaa

SEQ ID NO: 59813 - DNA, 20 bp, Artificial Sequence
  chemically synthesized
aagacatggttaacatttaa

SEQ ID NO: 59814 - DNA, 20 bp, Artificial Sequence
  chemically synthesized
taagacatggttaacattta

SEQ ID NO: 59815 - DNA, 20 bp, Artificial Sequence
  chemically synthesized
ttaagacatggttaacattt

SEQ ID NO: 59816 - DNA, 20 bp, Artificial Sequence
  chemically synthesized
aagggggagcgaatagggaa

SEQ ID NO: 59817 - DNA, 20 bp, Artificial Sequence
  chemically synthesized
agggttgaagggggagcgaa

SEQ ID NO: 59818 - DNA, 20 bp, Artificial Sequence
  chemically synthesized
gagggttgaagggggagcga

SEQ ID NO: 59819 - DNA, 20 bp, Artificial Sequence
  chemically synthesized
tgagggttgaagggggagcg

SEQ ID NO: 59820 - DNA, 20 bp, Artificial Sequence
  chemically synthesized
ttgagggttgaagggggagc

SEQ ID NO: 59821 - DNA, 20 bp, Artificial Sequence
  chemically synthesized
tttttgagggttgaaggggg

SEQ ID NO: 59822 - DNA, 20 bp, Artificial Sequence
  chemically synthesized
ctttttgagggttgaagggg

SEQ ID NO: 59823 - DNA, 20 bp, Artificial Sequence
  chemically synthesized
tctttttgagggttgaaggg

SEQ ID NO: 59824 - DNA, 20 bp, Artificial Sequence
  chemically synthesized
attttctttttgagggttga

SEQ ID NO: 59825 - DNA, 20 bp, Artificial Sequence
  chemically synthesized
aattttctttttgagggttg

SEQ ID NO: 59826 - DNA, 20 bp, Artificial Sequence
  chemically synthesized
cctttaattttctttttgag

SEQ ID NO: 59827 - DNA, 20 bp, Artificial Sequence
  chemically synthesized
ctctcttacctttaattttc

SEQ ID NO: 59828 - DNA, 20 bp, Artificial Sequence
  chemically synthesized
tctctaatgagtattgctct

SEQ ID NO: 59829 - DNA, 20 bp, Artificial Sequence
  chemically synthesized
ttatctctaatgagtattgc

SEQ ID NO: 59830 - DNA, 20 bp, Artificial Sequence
  chemically synthesized
cttatctctaatgagtattg

SEQ ID NO: 59831 - DNA, 20 bp, Artificial Sequence
  chemically synthesized
ctctttcttatctctaatga

SEQ ID NO: 59832 - DNA, 20 bp, Artificial Sequence
  chemically synthesized
ttactctttcttatctctaa

SEQ ID NO: 59833 - DNA, 20 bp, Artificial Sequence
  chemically synthesized
cttactctttcttatctcta

SEQ ID NO: 59834 - DNA, 20 bp, Artificial Sequence
  chemically synthesized
gtgaaacaaaactgagacaa

SEQ ID NO: 59835 - DNA, 20 bp, Artificial Sequence
  chemically synthesized
tcatcttagtgaaacaaaac

SEQ ID NO: 59836 - DNA, 20 bp, Artificial Sequence
  chemically synthesized
atcatcttagtgaaacaaaa

SEQ ID NO: 59837 - DNA, 20 bp, Artificial Sequence
  chemically synthesized
tatcatcttagtgaaacaaa

SEQ ID NO: 59838 - DNA, 20 bp, Artificial Sequence
  chemically synthesized
cctctctattttatcatctt

SEQ ID NO: 59839 - DNA, 20 bp, Artificial Sequence
  chemically synthesized
acctctctattttatcatct

SEQ ID NO: 59840 - DNA, 20 bp, Artificial Sequence
  chemically synthesized
tgctttacctctctatttta

SEQ ID NO: 59841 - DNA, 20 bp, Artificial Sequence
  chemically synthesized
acacatggaacttctgcttt

SEQ ID NO: 59842 - DNA, 20 bp, Artificial Sequence
  chemically synthesized
ttcacacatggaacttctgc

SEQ ID NO: 59843 - DNA, 20 bp, Artificial Sequence
  chemically synthesized
attgttcacacatggaactt

SEQ ID NO: 59844 - DNA, 20 bp, Artificial Sequence
  chemically synthesized
acaagttaattgttcacaca

SEQ ID NO: 59845 - DNA, 20 bp, Artificial Sequence
  chemically synthesized
cacaagttaattgttcacac

SEQ ID NO: 59846 - DNA, 20 bp, Artificial Sequence
  chemically synthesized
tcacaagttaattgttcaca

SEQ ID NO: 59847 - DNA, 20 bp, Artificial Sequence
  chemically synthesized
ccttttcacaagttaattgt

SEQ ID NO: 59848 - DNA, 20 bp, Artificial Sequence
  chemically synthesized
gccttttcacaagttaattg

SEQ ID NO: 59849 - DNA, 20 bp, Artificial Sequence
  chemically synthesized
tactacatttgccttttcac

SEQ ID NO: 59850 - DNA, 20 bp, Artificial Sequence
  chemically synthesized
ctactacatttgccttttca

SEQ ID NO: 59851 - DNA, 20 bp, Artificial Sequence
  chemically synthesized
tctactacatttgccttttc

SEQ ID NO: 59852 - DNA, 20 bp, Artificial Sequence
  chemically synthesized
tgtgtggccaacatgcacag

SEQ ID NO: 59853 - DNA, 20 bp, Artificial Sequence
  chemically synthesized
ccctaaccaggacccacact

SEQ ID NO: 59854 - DNA, 20 bp, Artificial Sequence
  chemically synthesized
tcttcccctaaccaggaccc

SEQ ID NO: 59855 - DNA, 20 bp, Artificial Sequence
  chemically synthesized
tcaaagccagttctcttccc

SEQ ID NO: 59856 - DNA, 20 bp, Artificial Sequence
  chemically synthesized
ttgtcaaagccagttctctt

SEQ ID NO: 59857 - DNA, 20 bp, Artificial Sequence
  chemically synthesized
taacctcagagataccctgt

SEQ ID NO: 59858 - DNA, 20 bp, Artificial Sequence
  chemically synthesized
ataacctcagagataccctg

SEQ ID NO: 59859 - DNA, 20 bp, Artificial Sequence
  chemically synthesized
tataacctcagagataccct

SEQ ID NO: 59860 - DNA, 20 bp, Artificial Sequence
  chemically synthesized
ttataacctcagagataccc

SEQ ID NO: 59861 - DNA, 20 bp, Artificial Sequence
  chemically synthesized
gatatggtgccctatccata

SEQ ID NO: 59862 - DNA, 20 bp, Artificial Sequence
  chemically synthesized
agatatggtgccctatccat

SEQ ID NO: 59863 - DNA, 20 bp, Artificial Sequence
  chemically synthesized
caatgtaaatggtgaacctt

SEQ ID NO: 59864 - DNA, 20 bp, Artificial Sequence
  chemically synthesized
gcaatgtaaatggtgaacct

SEQ ID NO: 59865 - DNA, 20 bp, Artificial Sequence
  chemically synthesized
tctgctcactctcagagaac

SEQ ID NO: 59866 - DNA, 20 bp, Artificial Sequence
  chemically synthesized
tcagaagactgagaacctct

SEQ ID NO: 59867 - DNA, 20 bp, Artificial Sequence
  chemically synthesized
taagaatgggctctcccctg

SEQ ID NO: 59868 - DNA, 20 bp, Artificial Sequence
  chemically synthesized
gtaagaatgggctctcccct

SEQ ID NO: 59869 - DNA, 20 bp, Artificial Sequence
  chemically synthesized
tgtaagaatgggctctcccc

SEQ ID NO: 59870 - DNA, 20 bp, Artificial Sequence
  chemically synthesized
catgctggtgtggagttttg

SEQ ID NO: 59871 - DNA, 20 bp, Artificial Sequence
  chemically synthesized
tgtgcatgtaagggcttgca

SEQ ID NO: 59872 - DNA, 20 bp, Artificial Sequence
  chemically synthesized
tgagtgcttatgtgcatgta

SEQ ID NO: 59873 - DNA, 20 bp, Artificial Sequence
  chemically synthesized
gtgtgttgtgagtgcttatg

SEQ ID NO: 59874 - DNA, 20 bp, Artificial Sequence
  chemically synthesized
gaggtggcagatgtcacctg

SEQ ID NO: 59875 - DNA, 20 bp, Artificial Sequence
  chemically synthesized
ggaggtggcagatgtcacct

SEQ ID NO: 59876 - DNA, 20 bp, Artificial Sequence
  chemically synthesized
agcatgtgggatatggggat

SEQ ID NO: 59877 - DNA, 20 bp, Artificial Sequence
  chemically synthesized
cagtctgctgggggatggag

SEQ ID NO: 59878 - DNA, 20 bp, Artificial Sequence
  chemically synthesized
gcagtctgctgggggatgga

SEQ ID NO: 59879 - DNA, 20 bp, Artificial Sequence
  chemically synthesized
ggaggaggcatgtcagattt

SEQ ID NO: 59880 - DNA, 20 bp, Artificial Sequence
  chemically synthesized
ccgttcggaggaggcatgtc

SEQ ID NO: 59881 - DNA, 20 bp, Artificial Sequence
  chemically synthesized
caaaggggcctatgccatca

SEQ ID NO: 59882 - DNA, 20 bp, Artificial Sequence
  chemically synthesized
ccatagccccaagagactca

SEQ ID NO: 59883 - DNA, 20 bp, Artificial Sequence
  chemically synthesized
tccaggggtgcttgccatag

SEQ ID NO: 59884 - DNA, 20 bp, Artificial Sequence
  chemically synthesized
ctgcttgtccaggggtgctt

SEQ ID NO: 59885 - DNA, 20 bp, Artificial Sequence
  chemically synthesized
ggacctagaaggagatgcta

SEQ ID NO: 59886 - DNA, 20 bp, Artificial Sequence
  chemically synthesized
atgaagtgtcccattaggac

SEQ ID NO: 59887 - DNA, 20 bp, Artificial Sequence
  chemically synthesized
cattaatgaagtgtcccatt

SEQ ID NO: 59888 - DNA, 20 bp, Artificial Sequence
  chemically synthesized
aatggtagttccattaatga

SEQ ID NO: 59889 - DNA, 20 bp, Artificial Sequence
  chemically synthesized
aactcacttaaatggtagtt

SEQ ID NO: 59890 - DNA, 20 bp, Artificial Sequence
  chemically synthesized
aaactcacttaaatggtagt

SEQ ID NO: 59891 - DNA, 20 bp, Artificial Sequence
  chemically synthesized
aacaaggggaagtgagggtg

SEQ ID NO: 59892 - DNA, 20 bp, Artificial Sequence
  chemically synthesized
gaagatgcttaaacaagggg

SEQ ID NO: 59893 - DNA, 20 bp, Artificial Sequence
  chemically synthesized
ctgggttggaagatgcttaa

SEQ ID NO: 59894 - DNA, 20 bp, Artificial Sequence
  chemically synthesized
agccttactgggttggaaga

SEQ ID NO: 59895 - DNA, 20 bp, Artificial Sequence
  chemically synthesized
cctcttcagccttactgggt

SEQ ID NO: 59896 - DNA, 20 bp, Artificial Sequence
  chemically synthesized
tacaatctgaataatcatat

SEQ ID NO: 59897 - DNA, 20 bp, Artificial Sequence
  chemically synthesized
ttgtacaatctgaataatca

SEQ ID NO: 59898 - DNA, 20 bp, Artificial Sequence
  chemically synthesized
agagggaatagattcttgta

SEQ ID NO: 59899 - DNA, 20 bp, Artificial Sequence
  chemically synthesized
atcaagcaatacttcagagg

SEQ ID NO: 59900 - DNA, 20 bp, Artificial Sequence
  chemically synthesized
gaaaaaggggctcattcatc

SEQ ID NO: 59901 - DNA, 20 bp, Artificial Sequence
  chemically synthesized
agcaaattagaaaaaggggc

SEQ ID NO: 59902 - DNA, 20 bp, Artificial Sequence
  chemically synthesized
gagcaaattagaaaaagggg

SEQ ID NO: 59903 - DNA, 20 bp, Artificial Sequence
  chemically synthesized
tttgagcaaattagaaaaag

SEQ ID NO: 59904 - DNA, 20 bp, Artificial Sequence
  chemically synthesized
ctttgagcaaattagaaaaa

SEQ ID NO: 59905 - DNA, 20 bp, Artificial Sequence
  chemically synthesized
ctcaagctcaaatgatttct

SEQ ID NO: 59906 - DNA, 20 bp, Artificial Sequence
  chemically synthesized
cctcaagctcaaatgatttc

SEQ ID NO: 59907 - DNA, 20 bp, Artificial Sequence
  chemically synthesized
tcctcaagctcaaatgattt

SEQ ID NO: 59908 - DNA, 20 bp, Artificial Sequence
  chemically synthesized
catatcacaacggctggtcc

SEQ ID NO: 59909 - DNA, 20 bp, Artificial Sequence
  chemically synthesized
ttacatatcacaacggctgg

SEQ ID NO: 59910 - DNA, 20 bp, Artificial Sequence
  chemically synthesized
tctaccttgttacatatcac

SEQ ID NO: 59911 - DNA, 20 bp, Artificial Sequence
  chemically synthesized
ctctaccttgttacatatca

SEQ ID NO: 59912 - DNA, 20 bp, Artificial Sequence
  chemically synthesized
tttctctaccttgttacata

SEQ ID NO: 59913 - DNA, 20 bp, Artificial Sequence
  chemically synthesized
gtttctctaccttgttacat

SEQ ID NO: 59914 - DNA, 20 bp, Artificial Sequence
  chemically synthesized
tgtttctctaccttgttaca

SEQ ID NO: 59915 - DNA, 20 bp, Artificial Sequence
  chemically synthesized
gcttttgtttctctaccttg

SEQ ID NO: 59916 - DNA, 20 bp, Artificial Sequence
  chemically synthesized
agcttttgtttctctacctt

SEQ ID NO: 59917 - DNA, 20 bp, Artificial Sequence
  chemically synthesized
atttagcttttgtttctcta

SEQ ID NO: 59918 - DNA, 20 bp, Artificial Sequence
  chemically synthesized
ttcatttagcttttgtttct

SEQ ID NO: 59919 - DNA, 20 bp, Artificial Sequence
  chemically synthesized
tgaggctcactcttcttcat

SEQ ID NO: 59920 - DNA, 20 bp, Artificial Sequence
  chemically synthesized
attctgaggctcactcttct

SEQ ID NO: 59921 - DNA, 20 bp, Artificial Sequence
  chemically synthesized
gattctgaggctcactcttc

SEQ ID NO: 59922 - DNA, 20 bp, Artificial Sequence
  chemically synthesized
tttgattctgaggctcactc

SEQ ID NO: 59923 - DNA, 20 bp, Artificial Sequence
  chemically synthesized
aagggatccaaatccagttc

SEQ ID NO: 59924 - DNA, 20 bp, Artificial Sequence
  chemically synthesized
aaagggatccaaatccagtt

SEQ ID NO: 59925 - DNA, 20 bp, Artificial Sequence
  chemically synthesized
aggcccctgtaaaatggttt

SEQ ID NO: 59926 - DNA, 20 bp, Artificial Sequence
  chemically synthesized
cattcaggcccctgtaaaat

SEQ ID NO: 59927 - DNA, 20 bp, Artificial Sequence
  chemically synthesized
attacattcaggcccctgta

SEQ ID NO: 59928 - DNA, 20 bp, Artificial Sequence
  chemically synthesized
agagaagttaattacattca

SEQ ID NO: 59929 - DNA, 20 bp, Artificial Sequence
  chemically synthesized
cagagaagttaattacattc

SEQ ID NO: 59930 - DNA, 20 bp, Artificial Sequence
  chemically synthesized
ataaggaaactgaatttcag

SEQ ID NO: 59931 - DNA, 20 bp, Artificial Sequence
  chemically synthesized
tcaccagcatattgataagg

SEQ ID NO: 59932 - DNA, 20 bp, Artificial Sequence
  chemically synthesized
aaacaatagtcacttatcac

SEQ ID NO: 59933 - DNA, 20 bp, Artificial Sequence
  chemically synthesized
tgctgtcttcaaacaatagt

SEQ ID NO: 59934 - DNA, 20 bp, Artificial Sequence
  chemically synthesized
cttatgctgtcttcaaacaa

SEQ ID NO: 59935 - DNA, 20 bp, Artificial Sequence
  chemically synthesized
gcttatgctgtcttcaaaca

SEQ ID NO: 59936 - DNA, 20 bp, Artificial Sequence
  chemically synthesized
aaggaagaacacatctccta

SEQ ID NO: 59937 - DNA, 20 bp, Artificial Sequence
  chemically synthesized
ataatagaggaattgaagga

SEQ ID NO: 59938 - DNA, 20 bp, Artificial Sequence
  chemically synthesized
aataatagaggaattgaagg

SEQ ID NO: 59939 - DNA, 20 bp, Artificial Sequence
  chemically synthesized
taataatagaggaattgaag

SEQ ID NO: 59940 - DNA, 20 bp, Artificial Sequence
  chemically synthesized
tgagctgaagcccctgccct

SEQ ID NO: 59941 - DNA, 20 bp, Artificial Sequence
  chemically synthesized
tcaacaaggccttctgagct

SEQ ID NO: 59942 - DNA, 20 bp, Artificial Sequence
  chemically synthesized
cattctcaacaaggccttct

SEQ ID NO: 59943 - DNA, 20 bp, Artificial Sequence
  chemically synthesized
ctgctctccattccattctc

SEQ ID NO: 59944 - DNA, 20 bp, Artificial Sequence
  chemically synthesized
ttcctgctctccattccatt

SEQ ID NO: 59945 - DNA, 20 bp, Artificial Sequence
  chemically synthesized
cccctctctcttgttcctgc

SEQ ID NO: 59946 - DNA, 20 bp, Artificial Sequence
  chemically synthesized
gcccctctctcttgttcctg

SEQ ID NO: 59947 - DNA, 20 bp, Artificial Sequence
  chemically synthesized
gagggaagcaggaggaaagg

SEQ ID NO: 59948 - DNA, 20 bp, Artificial Sequence
  chemically synthesized
tcaaaagggaaaatgccctg

SEQ ID NO: 59949 - DNA, 20 bp, Artificial Sequence
  chemically synthesized
atcaaaagggaaaatgccct

SEQ ID NO: 59950 - DNA, 20 bp, Artificial Sequence
  chemically synthesized
taaaaggggaagtttatcaa

SEQ ID NO: 59951 - DNA, 20 bp, Artificial Sequence
  chemically synthesized
gatgggttgtaaaaggggaa

SEQ ID NO: 59952 - DNA, 20 bp, Artificial Sequence
  chemically synthesized
acccttggatgggttgtaaa

SEQ ID NO: 59953 - DNA, 20 bp, Artificial Sequence
  chemically synthesized
cacccttggatgggttgtaa

SEQ ID NO: 59954 - DNA, 20 bp, Artificial Sequence
  chemically synthesized
tcacccttggatgggttgta

SEQ ID NO: 59955 - DNA, 20 bp, Artificial Sequence
  chemically synthesized
ttcacccttggatgggttgt

SEQ ID NO: 59956 - DNA, 20 bp, Artificial Sequence
  chemically synthesized
tttttcacccttggatgggt

SEQ ID NO: 59957 - DNA, 20 bp, Artificial Sequence
  chemically synthesized
gtttttcacccttggatggg

SEQ ID NO: 59958 - DNA, 20 bp, Artificial Sequence
  chemically synthesized
gaggtactgaaaaaaaagta

SEQ ID NO: 59959 - DNA, 20 bp, Artificial Sequence
  chemically synthesized
ccttagaggtactgaaaaaa

SEQ ID NO: 59960 - DNA, 20 bp, Artificial Sequence
  chemically synthesized
gccttagaggtactgaaaaa

SEQ ID NO: 59961 - DNA, 20 bp, Artificial Sequence
  chemically synthesized
tgctgctttgccttagaggt

SEQ ID NO: 59962 - DNA, 20 bp, Artificial Sequence
  chemically synthesized
ctgctgctttgccttagagg

SEQ ID NO: 59963 - DNA, 20 bp, Artificial Sequence
  chemically synthesized
gtagtggtgactgcctgttt

SEQ ID NO: 59964 - DNA, 20 bp, Artificial Sequence
  chemically synthesized
ttcgtagtggtgactgcctg

SEQ ID NO: 59965 - DNA, 20 bp, Artificial Sequence
  chemically synthesized
tagtcacttattcgtagtgg

SEQ ID NO: 59966 - DNA, 20 bp, Artificial Sequence
  chemically synthesized
ttgtagtcacttattcgtag

SEQ ID NO: 59967 - DNA, 20 bp, Artificial Sequence
  chemically synthesized
gcctagctcttgttgtagtc

SEQ ID NO: 59968 - DNA, 20 bp, Artificial Sequence
  chemically synthesized
ggcctagctcttgttgtagt

SEQ ID NO: 59969 - DNA, 20 bp, Artificial Sequence
  chemically synthesized
ccggcccaataaaatgcagc

SEQ ID NO: 59970 - DNA, 20 bp, Artificial Sequence
  chemically synthesized
cttgccggcccaataaaatg

SEQ ID NO: 59971 - DNA, 20 bp, Artificial Sequence
  chemically synthesized
aagttacttgccggcccaat

SEQ ID NO: 59972 - DNA, 20 bp, Artificial Sequence
  chemically synthesized
aaagttacttgccggcccaa

SEQ ID NO: 59973 - DNA, 20 bp, Artificial Sequence
  chemically synthesized
actcagtagagtgtgagctg

SEQ ID NO: 59974 - DNA, 20 bp, Artificial Sequence
  chemically synthesized
cactcagtagagtgtgagct

SEQ ID NO: 59975 - DNA, 20 bp, Artificial Sequence
  chemically synthesized
atcagactttcactcagtag

SEQ ID NO: 59976 - DNA, 20 bp, Artificial Sequence
  chemically synthesized
acaagaagatgcgggttcat

SEQ ID NO: 59977 - DNA, 20 bp, Artificial Sequence
  chemically synthesized
ttcacaagaagatgcgggtt

SEQ ID NO: 59978 - DNA, 20 bp, Artificial Sequence
  chemically synthesized
catgactgatctcaggcgca

SEQ ID NO: 59979 - DNA, 20 bp, Artificial Sequence
  chemically synthesized
ttgcatgactgatctcaggc

SEQ ID NO: 59980 - DNA, 20 bp, Artificial Sequence
  chemically synthesized
tctgggggtgggggtgctac

SEQ ID NO: 59981 - DNA, 20 bp, Artificial Sequence
  chemically synthesized
gttgtctgggggtgggggtg

SEQ ID NO: 59982 - DNA, 20 bp, Artificial Sequence
  chemically synthesized
gtcacagcctgggaagttag

SEQ ID NO: 59983 - DNA, 20 bp, Artificial Sequence
  chemically synthesized
ttggtcacagcctgggaagt

SEQ ID NO: 59984 - DNA, 20 bp, Artificial Sequence
  chemically synthesized
gctgcttgttggtcacagcc

SEQ ID NO: 59985 - DNA, 20 bp, Artificial Sequence
  chemically synthesized
cctgtcctggcctcttggct

SEQ ID NO: 59986 - DNA, 20 bp, Artificial Sequence
  chemically synthesized
ctagaaaggtcctgagactt

SEQ ID NO: 59987 - DNA, 20 bp, Artificial Sequence
  chemically synthesized
cctagaaaggtcctgagact

SEQ ID NO: 59988 - DNA, 20 bp, Artificial Sequence
  chemically synthesized
atttcctagaaaggtcctga

SEQ ID NO: 59989 - DNA, 20 bp, Artificial Sequence
  chemically synthesized
aggcagaacaaacccagaga

SEQ ID NO: 59990 - DNA, 20 bp, Artificial Sequence
  chemically synthesized
caggcagaacaaacccagag

SEQ ID NO: 59991 - DNA, 20 bp, Artificial Sequence
  chemically synthesized
tttcaggcagaacaaaccca

SEQ ID NO: 59992 - DNA, 20 bp, Artificial Sequence
  chemically synthesized
gtattatttcaggcagaaca

SEQ ID NO: 59993 - DNA, 20 bp, Artificial Sequence
  chemically synthesized
gagggagattggtattattt

SEQ ID NO: 59994 - DNA, 20 bp, Artificial Sequence
  chemically synthesized
gtatcaaatgctccacacat

SEQ ID NO: 59995 - DNA, 20 bp, Artificial Sequence
  chemically synthesized
ctgttagtatcaaatgctcc

SEQ ID NO: 59996 - DNA, 20 bp, Artificial Sequence
  chemically synthesized
cagggttgctgttagtatca

SEQ ID NO: 59997 - DNA, 20 bp, Artificial Sequence
  chemically synthesized
ctgccttgcagggttgctgt

SEQ ID NO: 59998 - DNA, 20 bp, Artificial Sequence
  chemically synthesized
ggcctctccctactgccttc

SEQ ID NO: 59999 - DNA, 20 bp, Artificial Sequence
  chemically synthesized
ctcttgggcctctccctact

SEQ ID NO: 60000 - DNA, 20 bp, Artificial Sequence
  chemically synthesized
atgctgaattcctcttgggc

SEQ ID NO: 60001 - DNA, 20 bp, Artificial Sequence
  chemically synthesized
cagaatgtcctcagggggtc

SEQ ID NO: 60002 - DNA, 20 bp, Artificial Sequence
  chemically synthesized
cacctcgtctcagctacagt

SEQ ID NO: 60003 - DNA, 20 bp, Artificial Sequence
  chemically synthesized
tatgctgtgaaccttgcacc

SEQ ID NO: 60004 - DNA, 20 bp, Artificial Sequence
  chemically synthesized
ggttatatgctgtgaacctt

SEQ ID NO: 60005 - DNA, 20 bp, Artificial Sequence
  chemically synthesized
taataaaattaggttatatg

SEQ ID NO: 60006 - DNA, 20 bp, Artificial Sequence
  chemically synthesized
ttgtaataaaattaggttat

SEQ ID NO: 60007 - DNA, 20 bp, Artificial Sequence
  chemically synthesized
ttcttgtaataaaattaggt

SEQ ID NO: 60008 - DNA, 20 bp, Artificial Sequence
  chemically synthesized
attcttgtaataaaattagg

SEQ ID NO: 60009 - DNA, 20 bp, Artificial Sequence
  chemically synthesized
aactctgagtctttattctt

SEQ ID NO: 60010 - DNA, 20 bp, Artificial Sequence
  chemically synthesized
aaactctgagtctttattct

SEQ ID NO: 60011 - DNA, 20 bp, Artificial Sequence
  chemically synthesized
ctaatgagccccaaagcagg

SEQ ID NO: 60012 - DNA, 20 bp, Artificial Sequence
  chemically synthesized
ttactaatgagccccaaagc

SEQ ID NO: 60013 - DNA, 20 bp, Artificial Sequence
  chemically synthesized
gagaacttgttactaatgag

SEQ ID NO: 60014 - DNA, 20 bp, Artificial Sequence
  chemically synthesized
aatattggagaacttgttac

SEQ ID NO: 60015 - DNA, 20 bp, Artificial Sequence
  chemically synthesized
gaatattggagaacttgtta

SEQ ID NO: 60016 - DNA, 20 bp, Artificial Sequence
  chemically synthesized
tgaatattggagaacttgtt

SEQ ID NO: 60017 - DNA, 20 bp, Artificial Sequence
  chemically synthesized
ccttttgaatattggagaac

SEQ ID NO: 60018 - DNA, 20 bp, Artificial Sequence
  chemically synthesized
gccttttgaatattggagaa

SEQ ID NO: 60019 - DNA, 20 bp, Artificial Sequence
  chemically synthesized
cactaaaacacatccacttt

SEQ ID NO: 60020 - DNA, 20 bp, Artificial Sequence
  chemically synthesized
acactaaaacacatccactt

SEQ ID NO: 60021 - DNA, 20 bp, Artificial Sequence
  chemically synthesized
tacactaaaacacatccact

SEQ ID NO: 60022 - DNA, 20 bp, Artificial Sequence
  chemically synthesized
attttacactaaaacacatc

SEQ ID NO: 60023 - DNA, 20 bp, Artificial Sequence
  chemically synthesized
cagcagctagtgttaatttt

SEQ ID NO: 60024 - DNA, 20 bp, Artificial Sequence
  chemically synthesized
ttacagcagctagtgttaat

SEQ ID NO: 60025 - DNA, 20 bp, Artificial Sequence
  chemically synthesized
gttacagcagctagtgttaa

SEQ ID NO: 60026 - DNA, 20 bp, Artificial Sequence
  chemically synthesized
tttgttacagcagctagtgt

SEQ ID NO: 60027 - DNA, 20 bp, Artificial Sequence
  chemically synthesized
ggggcttatttgttacagca

SEQ ID NO: 60028 - DNA, 20 bp, Artificial Sequence
  chemically synthesized
gggggcttatttgttacagc

SEQ ID NO: 60029 - DNA, 20 bp, Artificial Sequence
  chemically synthesized
agatatcatatgtttggggg

SEQ ID NO: 60030 - DNA, 20 bp, Artificial Sequence
  chemically synthesized
gagatatcatatgtttgggg

SEQ ID NO: 60031 - DNA, 20 bp, Artificial Sequence
  chemically synthesized
actctgatgtgagtgagaaa

SEQ ID NO: 60032 - DNA, 20 bp, Artificial Sequence
  chemically synthesized
gactctgatgtgagtgagaa

SEQ ID NO: 60033 - DNA, 20 bp, Artificial Sequence
  chemically synthesized
tgactctgatgtgagtgaga

SEQ ID NO: 60034 - DNA, 20 bp, Artificial Sequence
  chemically synthesized
gaaacatccattttgactct

SEQ ID NO: 60035 - DNA, 20 bp, Artificial Sequence
  chemically synthesized
cagacggtggagccacaaga

SEQ ID NO: 60036 - DNA, 20 bp, Artificial Sequence
  chemically synthesized
gagtcctgcattacagacgg

SEQ ID NO: 60037 - DNA, 20 bp, Artificial Sequence
  chemically synthesized
caccacttggagtcctgcat

SEQ ID NO: 60038 - DNA, 20 bp, Artificial Sequence
  chemically synthesized
caccctgggccagacacaca

SEQ ID NO: 60039 - DNA, 20 bp, Artificial Sequence
  chemically synthesized
tgagtgaggtgggcagaaga

SEQ ID NO: 60040 - DNA, 20 bp, Artificial Sequence
  chemically synthesized
cagtggggtgtggccttgtg

SEQ ID NO: 60041 - DNA, 20 bp, Artificial Sequence
  chemically synthesized
tccagcctctcttgcagtgg

SEQ ID NO: 60042 - DNA, 20 bp, Artificial Sequence
  chemically synthesized
aatccagtccgcattctcca

SEQ ID NO: 60043 - DNA, 20 bp, Artificial Sequence
  chemically synthesized
aaatccagtccgcattctcc

SEQ ID NO: 60044 - DNA, 20 bp, Artificial Sequence
  chemically synthesized
ggtttaaatccagtccgcat

SEQ ID NO: 60045 - DNA, 20 bp, Artificial Sequence
  chemically synthesized
ttgggtttaaatccagtccg

SEQ ID NO: 60046 - DNA, 20 bp, Artificial Sequence
  chemically synthesized
ttcttgggtttaaatccagt

SEQ ID NO: 60047 - DNA, 20 bp, Artificial Sequence
  chemically synthesized
ttcttcttgggtttaaatcc

SEQ ID NO: 60048 - DNA, 20 bp, Artificial Sequence
  chemically synthesized
cttcttcttgggtttaaatc

SEQ ID NO: 60049 - DNA, 20 bp, Artificial Sequence
  chemically synthesized
agaaaaccatttcttcttct

SEQ ID NO: 60050 - DNA, 20 bp, Artificial Sequence
  chemically synthesized
tgtcagtaaatggccaacta

SEQ ID NO: 60051 - DNA, 20 bp, Artificial Sequence
  chemically synthesized
gtgtcagtaaatggccaact

SEQ ID NO: 60052 - DNA, 20 bp, Artificial Sequence
  chemically synthesized
tgtgtcagtaaatggccaac

SEQ ID NO: 60053 - DNA, 20 bp, Artificial Sequence
  chemically synthesized
ttgtgtcagtaaatggccaa

SEQ ID NO: 60054 - DNA, 20 bp, Artificial Sequence
  chemically synthesized
accctttttgtgtcagtaaa

SEQ ID NO: 60055 - DNA, 20 bp, Artificial Sequence
  chemically synthesized
gaccctttttgtgtcagtaa

SEQ ID NO: 60056 - DNA, 20 bp, Artificial Sequence
  chemically synthesized
atctcctctgcaagtcactt

SEQ ID NO: 60057 - DNA, 20 bp, Artificial Sequence
  chemically synthesized
aaattcatctcctctgcaag

SEQ ID NO: 60058 - DNA, 20 bp, Artificial Sequence
  chemically synthesized
aaaattcatctcctctgcaa

SEQ ID NO: 60059 - DNA, 20 bp, Artificial Sequence
  chemically synthesized
tagtatttaaaattcatctc

SEQ ID NO: 60060 - DNA, 20 bp, Artificial Sequence
  chemically synthesized
tgtctaaagggcagccaagg

SEQ ID NO: 60061 - DNA, 20 bp, Artificial Sequence
  chemically synthesized
actggaaaagaaaaagaaat

SEQ ID NO: 60062 - DNA, 20 bp, Artificial Sequence
  chemically synthesized
aactggaaaagaaaaagaaa

SEQ ID NO: 60063 - DNA, 20 bp, Artificial Sequence
  chemically synthesized
ccgatagacgacactcaggt

SEQ ID NO: 60064 - DNA, 20 bp, Artificial Sequence
  chemically synthesized
gctccttcccgatagacgac

SEQ ID NO: 60065 - DNA, 20 bp, Artificial Sequence
  chemically synthesized
aatgtcaccacaaagtcatt

SEQ ID NO: 60066 - DNA, 20 bp, Artificial Sequence
  chemically synthesized
caagtgtgatgtattaaatg

SEQ ID NO: 60067 - DNA, 20 bp, Artificial Sequence
  chemically synthesized
gcaagtgtgatgtattaaat

SEQ ID NO: 60068 - DNA, 20 bp, Artificial Sequence
  chemically synthesized
tgcaagtgtgatgtattaaa

SEQ ID NO: 60069 - DNA, 20 bp, Artificial Sequence
  chemically synthesized
ttttgcaagtgtgatgtatt

SEQ ID NO: 60070 - DNA, 20 bp, Artificial Sequence
  chemically synthesized
catacttcttttgcaagtgt

SEQ ID NO: 60071 - DNA, 20 bp, Artificial Sequence
  chemically synthesized
acatacttcttttgcaagtg

SEQ ID NO: 60072 - DNA, 20 bp, Artificial Sequence
  chemically synthesized
tacatacttcttttgcaagt

SEQ ID NO: 60073 - DNA, 20 bp, Artificial Sequence
  chemically synthesized
aaacttttacatacttcttt

SEQ ID NO: 60074 - DNA, 20 bp, Artificial Sequence
  chemically synthesized
ctggcggtaagctacatcgt

SEQ ID NO: 60075 - DNA, 20 bp, Artificial Sequence
  chemically synthesized
cctggcggtaagctacatcg

SEQ ID NO: 60076 - DNA, 20 bp, Artificial Sequence
  chemically synthesized
tcctggcggtaagctacatc

SEQ ID NO: 60077 - DNA, 20 bp, Artificial Sequence
  chemically synthesized
atccttttcctggcggtaag

SEQ ID NO: 60078 - DNA, 20 bp, Artificial Sequence
  chemically synthesized
catccttttcctggcggtaa

SEQ ID NO: 60079 - DNA, 20 bp, Artificial Sequence
  chemically synthesized
tcatccttttcctggcggta

SEQ ID NO: 60080 - DNA, 20 bp, Artificial Sequence
  chemically synthesized
ttttcatccttttcctggcg

SEQ ID NO: 60081 - DNA, 20 bp, Artificial Sequence
  chemically synthesized
gttttcatccttttcctggc

SEQ ID NO: 60082 - DNA, 20 bp, Artificial Sequence
  chemically synthesized
aactacataccgtccatttg

SEQ ID NO: 60083 - DNA, 20 bp, Artificial Sequence
  chemically synthesized
atgtagttgaactacatacc

SEQ ID NO: 60084 - DNA, 20 bp, Artificial Sequence
  chemically synthesized
ttaatgtagttgaactacat

SEQ ID NO: 60085 - DNA, 20 bp, Artificial Sequence
  chemically synthesized
attaatgtagttgaactaca

SEQ ID NO: 60086 - DNA, 20 bp, Artificial Sequence
  chemically synthesized
tattaatgtagttgaactac

SEQ ID NO: 60087 - DNA, 20 bp, Artificial Sequence
  chemically synthesized
ttttattaatgtagttgaac

SEQ ID NO: 60088 - DNA, 20 bp, Artificial Sequence
  chemically synthesized
attttattaatgtagttgaa

SEQ ID NO: 60089 - DNA, 20 bp, Artificial Sequence
  chemically synthesized
tattttattaatgtagttga

SEQ ID NO: 60090 - DNA, 20 bp, Artificial Sequence
  chemically synthesized
ttattttattaatgtagttg

SEQ ID NO: 60091 - DNA, 20 bp, Artificial Sequence
  chemically synthesized
ataagtttttattttattaa

SEQ ID NO: 60092 - DNA, 20 bp, Artificial Sequence
  chemically synthesized
ggccctcccaggggaaatgc

SEQ ID NO: 60093 - DNA, 20 bp, Artificial Sequence
  chemically synthesized
ttgggccctcccaggggaaa

SEQ ID NO: 60094 - DNA, 20 bp, Artificial Sequence
  chemically synthesized
aaagcaaaattgttgggccc

SEQ ID NO: 60095 - DNA, 20 bp, Artificial Sequence
  chemically synthesized
gaaagcaaaattgttgggcc

SEQ ID NO: 60096 - DNA, 20 bp, Artificial Sequence
  chemically synthesized
tgaaagcaaaattgttgggc

SEQ ID NO: 60097 - DNA, 20 bp, Artificial Sequence
  chemically synthesized
agtagaaggtagattttgaa

SEQ ID NO: 60098 - DNA, 20 bp, Artificial Sequence
  chemically synthesized
cagtagaaggtagattttga

SEQ ID NO: 60099 - DNA, 20 bp, Artificial Sequence
  chemically synthesized
tttcagtagaaggtagattt

SEQ ID NO: 60100 - DNA, 20 bp, Artificial Sequence
  chemically synthesized
ggagattctttcagtagaag

SEQ ID NO: 60101 - DNA, 20 bp, Artificial Sequence
  chemically synthesized
atggggccaatattgggaga

SEQ ID NO: 60102 - DNA, 20 bp, Artificial Sequence
  chemically synthesized
catggggccaatattgggag

SEQ ID NO: 60103 - DNA, 20 bp, Artificial Sequence
  chemically synthesized
tcatggggccaatattggga

SEQ ID NO: 60104 - DNA, 20 bp, Artificial Sequence
  chemically synthesized
gagcagaagaaaacaaccag

SEQ ID NO: 60105 - DNA, 20 bp, Artificial Sequence
  chemically synthesized
tgaagaccaaaattagagca

SEQ ID NO: 60106 - DNA, 20 bp, Artificial Sequence
  chemically synthesized
tccaactcactaatgtagaa

SEQ ID NO: 60107 - DNA, 20 bp, Artificial Sequence
  chemically synthesized
ttatccaactcactaatgta

SEQ ID NO: 60108 - DNA, 20 bp, Artificial Sequence
  chemically synthesized
gcctcaatctatattgttat

SEQ ID NO: 60109 - DNA, 20 bp, Artificial Sequence
  chemically synthesized
ggcctcaatctatattgtta

SEQ ID NO: 60110 - DNA, 20 bp, Artificial Sequence
  chemically synthesized
atttggcctcaatctatatt

SEQ ID NO: 60111 - DNA, 20 bp, Artificial Sequence
  chemically synthesized
aggcccctgaatacagagga

SEQ ID NO: 60112 - DNA, 20 bp, Artificial Sequence
  chemically synthesized
gaggcccctgaatacagagg

SEQ ID NO: 60113 - DNA, 20 bp, Artificial Sequence
  chemically synthesized
tgaggcccctgaatacagag

SEQ ID NO: 60114 - DNA, 20 bp, Artificial Sequence
  chemically synthesized
ttgaggcccctgaatacaga

SEQ ID NO: 60115 - DNA, 20 bp, Artificial Sequence
  chemically synthesized
cctatgaaagtggcactaga

SEQ ID NO: 60116 - DNA, 20 bp, Artificial Sequence
  chemically synthesized
gcctatgaaagtggcactag

SEQ ID NO: 60117 - DNA, 20 bp, Artificial Sequence
  chemically synthesized
cctgatttgcctatgaaagt

SEQ ID NO: 60118 - DNA, 20 bp, Artificial Sequence
  chemically synthesized
gcctgatttgcctatgaaag

SEQ ID NO: 60119 - DNA, 20 bp, Artificial Sequence
  chemically synthesized
tgcctgatttgcctatgaaa

SEQ ID NO: 60120 - DNA, 20 bp, Artificial Sequence
  chemically synthesized
gtgatcataagcagatatac

SEQ ID NO: 60121 - DNA, 20 bp, Artificial Sequence
  chemically synthesized
cctcatgctggtcccatgaa

SEQ ID NO: 60122 - DNA, 20 bp, Artificial Sequence
  chemically synthesized
acctcatgctggtcccatga

SEQ ID NO: 60123 - DNA, 20 bp, Artificial Sequence
  chemically synthesized
tttacctcatgctggtccca

SEQ ID NO: 60124 - DNA, 20 bp, Artificial Sequence
  chemically synthesized
ctttacctcatgctggtccc

SEQ ID NO: 60125 - DNA, 20 bp, Artificial Sequence
  chemically synthesized
tctttacctcatgctggtcc

SEQ ID NO: 60126 - DNA, 20 bp, Artificial Sequence
  chemically synthesized
tgcctcttttctttacctca

SEQ ID NO: 60127 - DNA, 20 bp, Artificial Sequence
  chemically synthesized
aaataaaaacaaaacaaagg

SEQ ID NO: 60128 - DNA, 20 bp, Artificial Sequence
  chemically synthesized
aaaataaaaacaaaacaaag

SEQ ID NO: 60129 - DNA, 20 bp, Artificial Sequence
  chemically synthesized
ggctttaaaataaaaacaaa

SEQ ID NO: 60130 - DNA, 20 bp, Artificial Sequence
  chemically synthesized
aaaaacaaagaccttgggct

SEQ ID NO: 60131 - DNA, 20 bp, Artificial Sequence
  chemically synthesized
cttcaaaaacaaagaccttg

SEQ ID NO: 60132 - DNA, 20 bp, Artificial Sequence
  chemically synthesized
agctgttacttcaaaaacaa

SEQ ID NO: 60133 - DNA, 20 bp, Artificial Sequence
  chemically synthesized
tgaagggtaaaaattaagct

SEQ ID NO: 60134 - DNA, 20 bp, Artificial Sequence
  chemically synthesized
caacctcaacaaatcatgaa

SEQ ID NO: 60135 - DNA, 20 bp, Artificial Sequence
  chemically synthesized
agggactgccaaatcattcc

SEQ ID NO: 60136 - DNA, 20 bp, Artificial Sequence
  chemically synthesized
cagggactgccaaatcattc

SEQ ID NO: 60137 - DNA, 20 bp, Artificial Sequence
  chemically synthesized
tgccacctcctccccaaaat

SEQ ID NO: 60138 - DNA, 20 bp, Artificial Sequence
  chemically synthesized
agagaaatctcataacctgg

SEQ ID NO: 60139 - DNA, 20 bp, Artificial Sequence
  chemically synthesized
gtgggttaagagaaatctca

SEQ ID NO: 60140 - DNA, 20 bp, Artificial Sequence
  chemically synthesized
ggttggtgggttaagagaaa

SEQ ID NO: 60141 - DNA, 20 bp, Artificial Sequence
  chemically synthesized
atctctgaggtgcagaaaga

SEQ ID NO: 60142 - DNA, 20 bp, Artificial Sequence
  chemically synthesized
ttcatctctgaggtgcagaa

SEQ ID NO: 60143 - DNA, 20 bp, Artificial Sequence
  chemically synthesized
aggaagagaaatcatcatct

SEQ ID NO: 60144 - DNA, 20 bp, Artificial Sequence
  chemically synthesized
gcctgaaaaaacaggacagc

SEQ ID NO: 60145 - DNA, 20 bp, Artificial Sequence
  chemically synthesized
catcacactgcaaacaaaca

SEQ ID NO: 60146 - DNA, 20 bp, Artificial Sequence
  chemically synthesized
tgcaagtggcatcttgcatc

SEQ ID NO: 60147 - DNA, 20 bp, Artificial Sequence
  chemically synthesized
atgcaagtggcatcttgcat

SEQ ID NO: 60148 - DNA, 20 bp, Artificial Sequence
  chemically synthesized
catttatgcaagtggcatct

SEQ ID NO: 60149 - DNA, 20 bp, Artificial Sequence
  chemically synthesized
ttacatttatgcaagtggca

SEQ ID NO: 60150 - DNA, 20 bp, Artificial Sequence
  chemically synthesized
gggcagttgttacatttatg

SEQ ID NO: 60151 - DNA, 20 bp, Artificial Sequence
  chemically synthesized
ggggcagttgttacatttat

SEQ ID NO: 60152 - DNA, 20 bp, Artificial Sequence
  chemically synthesized
agatgaataatgaaagatgg

SEQ ID NO: 60153 - DNA, 20 bp, Artificial Sequence
  chemically synthesized
cagatgaataatgaaagatg

SEQ ID NO: 60154 - DNA, 20 bp, Artificial Sequence
  chemically synthesized
tcagatgaataatgaaagat

SEQ ID NO: 60155 - DNA, 20 bp, Artificial Sequence
  chemically synthesized
gtgcaattttcagatgaata

SEQ ID NO: 60156 - DNA, 20 bp, Artificial Sequence
  chemically synthesized
aattggtgcaattttcagat

SEQ ID NO: 60157 - DNA, 20 bp, Artificial Sequence
  chemically synthesized
caattggtgcaattttcaga

SEQ ID NO: 60158 - DNA, 20 bp, Artificial Sequence
  chemically synthesized
tcaattggtgcaattttcag

SEQ ID NO: 60159 - DNA, 20 bp, Artificial Sequence
  chemically synthesized
cttttcaattggtgcaattt

SEQ ID NO: 60160 - DNA, 20 bp, Artificial Sequence
  chemically synthesized
tccactaagttgcttttcaa

SEQ ID NO: 60161 - DNA, 20 bp, Artificial Sequence
  chemically synthesized
ctccactaagttgcttttca

SEQ ID NO: 60162 - DNA, 20 bp, Artificial Sequence
  chemically synthesized
ctttctccactaagttgctt

SEQ ID NO: 60163 - DNA, 20 bp, Artificial Sequence
  chemically synthesized
ataatccttcctttctccac

SEQ ID NO: 60164 - DNA, 20 bp, Artificial Sequence
  chemically synthesized
ttcataatccttcctttctc

SEQ ID NO: 60165 - DNA, 20 bp, Artificial Sequence
  chemically synthesized
attcataatccttcctttct

SEQ ID NO: 60166 - DNA, 20 bp, Artificial Sequence
  chemically synthesized
tcctggcagcatttattcat

SEQ ID NO: 60167 - DNA, 20 bp, Artificial Sequence
  chemically synthesized
actaattgtcctggcagcat

SEQ ID NO: 60168 - DNA, 20 bp, Artificial Sequence
  chemically synthesized
gttaactaattgtcctggca

SEQ ID NO: 60169 - DNA, 20 bp, Artificial Sequence
  chemically synthesized
agttaactaattgtcctggc

SEQ ID NO: 60170 - DNA, 20 bp, Artificial Sequence
  chemically synthesized
tagttaactaattgtcctgg

SEQ ID NO: 60171 - DNA, 20 bp, Artificial Sequence
  chemically synthesized
ttagttaactaattgtcctg

SEQ ID NO: 60172 - DNA, 20 bp, Artificial Sequence
  chemically synthesized
tttttagttaactaattgtc

SEQ ID NO: 60173 - DNA, 20 bp, Artificial Sequence
  chemically synthesized
ctttttagttaactaattgt

SEQ ID NO: 60174 - DNA, 20 bp, Artificial Sequence
  chemically synthesized
tctttttagttaactaattg

SEQ ID NO: 60175 - DNA, 20 bp, Artificial Sequence
  chemically synthesized
ttctttttagttaactaatt

SEQ ID NO: 60176 - DNA, 20 bp, Artificial Sequence
  chemically synthesized
tctatttttctttttagtta

SEQ ID NO: 60177 - DNA, 20 bp, Artificial Sequence
  chemically synthesized
atctatttttctttttagtt

SEQ ID NO: 60178 - DNA, 20 bp, Artificial Sequence
  chemically synthesized
aatttatctatttttctttt

SEQ ID NO: 60179 - DNA, 20 bp, Artificial Sequence
  chemically synthesized
ttgaatttatctatttttct

SEQ ID NO: 60180 - DNA, 20 bp, Artificial Sequence
  chemically synthesized
attgaatttatctatttttc

SEQ ID NO: 60181 - DNA, 20 bp, Artificial Sequence
  chemically synthesized
atgtatttattgaatttatc

SEQ ID NO: 60182 - DNA, 20 bp, Artificial Sequence
  chemically synthesized
cactccaacctggatgactg

SEQ ID NO: 60183 - DNA, 20 bp, Artificial Sequence
  chemically synthesized
cagtgagccaagatggcgcc

SEQ ID NO: 60184 - DNA, 20 bp, Artificial Sequence
  chemically synthesized
aacccgggaggcggaggttg

SEQ ID NO: 60185 - DNA, 20 bp, Artificial Sequence
  chemically synthesized
cttgaacccgggaggcggag

SEQ ID NO: 60186 - DNA, 20 bp, Artificial Sequence
  chemically synthesized
ggaggctgagatgggagaat

SEQ ID NO: 60187 - DNA, 20 bp, Artificial Sequence
  chemically synthesized
gccgggcatgatggcgggtg

SEQ ID NO: 60188 - DNA, 20 bp, Artificial Sequence
  chemically synthesized
aagaccagcctggccaacat

SEQ ID NO: 60189 - DNA, 20 bp, Artificial Sequence
  chemically synthesized
ggaggctgaggtgggcagat

SEQ ID NO: 60190 - DNA, 20 bp, Artificial Sequence
  chemically synthesized
gggaggctgaggtgggcaga

SEQ ID NO: 60191 - DNA, 20 bp, Artificial Sequence
  chemically synthesized
tgcctgtaatcccagcactt

SEQ ID NO: 60192 - DNA, 20 bp, Artificial Sequence
  chemically synthesized
gcttatgcctgtaatcccag

SEQ ID NO: 60193 - DNA, 20 bp, Artificial Sequence
  chemically synthesized
gctggcgtgttggcttatgc

SEQ ID NO: 60194 - DNA, 20 bp, Artificial Sequence
  chemically synthesized
ggctggcgtgttggcttatg

SEQ ID NO: 60195 - DNA, 20 bp, Artificial Sequence
  chemically synthesized
tggctggcgtgttggcttat

SEQ ID NO: 60196 - DNA, 20 bp, Artificial Sequence
  chemically synthesized
ttggctggcgtgttggctta

SEQ ID NO: 60197 - DNA, 20 bp, Artificial Sequence
  chemically synthesized
aaacaatttttggctggcgt

SEQ ID NO: 60198 - DNA, 20 bp, Artificial Sequence
  chemically synthesized
attaaaacaatttttggctg

SEQ ID NO: 60199 - DNA, 20 bp, Artificial Sequence
  chemically synthesized
aattaaaacaatttttggct

SEQ ID NO: 60200 - DNA, 20 bp, Artificial Sequence
  chemically synthesized
taattaaaacaatttttggc

SEQ ID NO: 60201 - DNA, 20 bp, Artificial Sequence
  chemically synthesized
ttaattaaaacaatttttgg

SEQ ID NO: 60202 - DNA, 20 bp, Artificial Sequence
  chemically synthesized
tttaattaaaacaatttttg

SEQ ID NO: 60203 - DNA, 20 bp, Artificial Sequence
  chemically synthesized
ttttaattaaaacaattttt

SEQ ID NO: 60204 - DNA, 20 bp, Artificial Sequence
  chemically synthesized
tttttaattaaaacaatttt

SEQ ID NO: 60205 - DNA, 20 bp, Artificial Sequence
  chemically synthesized
attttttttaattaaaacaa

SEQ ID NO: 60206 - DNA, 20 bp, Artificial Sequence
  chemically synthesized
aattttttttaattaaaaca

SEQ ID NO: 60207 - DNA, 20 bp, Artificial Sequence
  chemically synthesized
gtttaattttttttaattaa

SEQ ID NO: 60208 - DNA, 20 bp, Artificial Sequence
  chemically synthesized
agtttaattttttttaatta

SEQ ID NO: 60209 - DNA, 20 bp, Artificial Sequence
  chemically synthesized
tatgaaggtggctaggcatt

SEQ ID NO: 60210 - DNA, 20 bp, Artificial Sequence
  chemically synthesized
ttatatgaaggtggctaggc

SEQ ID NO: 60211 - DNA, 20 bp, Artificial Sequence
  chemically synthesized
ttgttatatgaaggtggcta

SEQ ID NO: 60212 - DNA, 20 bp, Artificial Sequence
  chemically synthesized
ttgttgttatatgaaggtgg

SEQ ID NO: 60213 - DNA, 20 bp, Artificial Sequence
  chemically synthesized
gttgttgttatatgaaggtg

SEQ ID NO: 60214 - DNA, 20 bp, Artificial Sequence
  chemically synthesized
tgttgttgttatatgaaggt

SEQ ID NO: 60215 - DNA, 20 bp, Artificial Sequence
  chemically synthesized
aatcatctggtattttgttg

SEQ ID NO: 60216 - DNA, 20 bp, Artificial Sequence
  chemically synthesized
cttaaatcatctggtatttt

SEQ ID NO: 60217 - DNA, 20 bp, Artificial Sequence
  chemically synthesized
ccttaaatcatctggtattt

SEQ ID NO: 60218 - DNA, 20 bp, Artificial Sequence
  chemically synthesized
tataatttccttaaatcatc

SEQ ID NO: 60219 - DNA, 20 bp, Artificial Sequence
  chemically synthesized
atataatttccttaaatcat

SEQ ID NO: 60220 - DNA, 20 bp, Artificial Sequence
  chemically synthesized
tatataatttccttaaatca

SEQ ID NO: 60221 - DNA, 20 bp, Artificial Sequence
  chemically synthesized
acttttatataatttcctta

SEQ ID NO: 60222 - DNA, 20 bp, Artificial Sequence
  chemically synthesized
cacttttatataatttcctt

SEQ ID NO: 60223 - DNA, 20 bp, Artificial Sequence
  chemically synthesized
gagtttcacttttatataat

SEQ ID NO: 60224 - DNA, 20 bp, Artificial Sequence
  chemically synthesized
agagtttcacttttatataa

SEQ ID NO: 60225 - DNA, 20 bp, Artificial Sequence
  chemically synthesized
tttagagtttcacttttata

SEQ ID NO: 60226 - DNA, 20 bp, Artificial Sequence
  chemically synthesized
gtttagagtttcacttttat

SEQ ID NO: 60227 - DNA, 20 bp, Artificial Sequence
  chemically synthesized
taatttgtttagagtttcac

SEQ ID NO: 60228 - DNA, 20 bp, Artificial Sequence
  chemically synthesized
ctaatttgtttagagtttca

SEQ ID NO: 60229 - DNA, 20 bp, Artificial Sequence
  chemically synthesized
tctaatttgtttagagtttc

SEQ ID NO: 60230 - DNA, 20 bp, Artificial Sequence
  chemically synthesized
ttctaatttgtttagagttt

SEQ ID NO: 60231 - DNA, 20 bp, Artificial Sequence
  chemically synthesized
gctataatttttctaatttg

SEQ ID NO: 60232 - DNA, 20 bp, Artificial Sequence
  chemically synthesized
ggctataatttttctaattt

SEQ ID NO: 60233 - DNA, 20 bp, Artificial Sequence
  chemically synthesized
tgtaaacatttggctataat

SEQ ID NO: 60234 - DNA, 20 bp, Artificial Sequence
  chemically synthesized
atgtcaagattatgtaaaca

SEQ ID NO: 60235 - DNA, 20 bp, Artificial Sequence
  chemically synthesized
ttcatgtcaagattatgtaa

SEQ ID NO: 60236 - DNA, 20 bp, Artificial Sequence
  chemically synthesized
ttcttcatgtcaagattatg

SEQ ID NO: 60237 - DNA, 20 bp, Artificial Sequence
  chemically synthesized
gaatgttcttcttcatgtca

SEQ ID NO: 60238 - DNA, 20 bp, Artificial Sequence
  chemically synthesized
atgcttagaatgttcttctt

SEQ ID NO: 60239 - DNA, 20 bp, Artificial Sequence
  chemically synthesized
gatgcttagaatgttcttct

SEQ ID NO: 60240 - DNA, 20 bp, Artificial Sequence
  chemically synthesized
tacagctttgatgcttagaa

SEQ ID NO: 60241 - DNA, 20 bp, Artificial Sequence
  chemically synthesized
ttctacagctttgatgctta

SEQ ID NO: 60242 - DNA, 20 bp, Artificial Sequence
  chemically synthesized
cttctacagctttgatgctt

SEQ ID NO: 60243 - DNA, 20 bp, Artificial Sequence
  chemically synthesized
tcttctacagctttgatgct

SEQ ID NO: 60244 - DNA, 20 bp, Artificial Sequence
  chemically synthesized
ttttcttctacagctttgat

SEQ ID NO: 60245 - DNA, 20 bp, Artificial Sequence
  chemically synthesized
cttttcttctacagctttga

SEQ ID NO: 60246 - DNA, 20 bp, Artificial Sequence
  chemically synthesized
catgtctcaatcctttcttt

SEQ ID NO: 60247 - DNA, 20 bp, Artificial Sequence
  chemically synthesized
tgtagttgcatgtctcaatc

SEQ ID NO: 60248 - DNA, 20 bp, Artificial Sequence
  chemically synthesized
atgtagttgcatgtctcaat

SEQ ID NO: 60249 - DNA, 20 bp, Artificial Sequence
  chemically synthesized
tatgtagttgcatgtctcaa

SEQ ID NO: 60250 - DNA, 20 bp, Artificial Sequence
  chemically synthesized
ttatgtagttgcatgtctca

SEQ ID NO: 60251 - DNA, 20 bp, Artificial Sequence
  chemically synthesized
acatatataaacctccactt

SEQ ID NO: 60252 - DNA, 20 bp, Artificial Sequence
  chemically synthesized
tgtgtgttgacatatataaa

SEQ ID NO: 60253 - DNA, 20 bp, Artificial Sequence
  chemically synthesized
ttgtgtgtgttgacatatat

SEQ ID NO: 60254 - DNA, 20 bp, Artificial Sequence
  chemically synthesized
attattgtgtgtgttgacat

SEQ ID NO: 60255 - DNA, 20 bp, Artificial Sequence
  chemically synthesized
gattattgtgtgtgttgaca

SEQ ID NO: 60256 - DNA, 20 bp, Artificial Sequence
  chemically synthesized
tgattattgtgtgtgttgac

SEQ ID NO: 60257 - DNA, 20 bp, Artificial Sequence
  chemically synthesized
ttgattattgtgtgtgttga

SEQ ID NO: 60258 - DNA, 20 bp, Artificial Sequence
  chemically synthesized
atttttgattattgtgtgtg

SEQ ID NO: 60259 - DNA, 20 bp, Artificial Sequence
  chemically synthesized
gatttttgattattgtgtgt

SEQ ID NO: 60260 - DNA, 20 bp, Artificial Sequence
  chemically synthesized
tgatttttgattattgtgtg

SEQ ID NO: 60261 - DNA, 20 bp, Artificial Sequence
  chemically synthesized
ttgatttttgattattgtgt

SEQ ID NO: 60262 - DNA, 20 bp, Artificial Sequence
  chemically synthesized
catttttgatttttgattat

SEQ ID NO: 60263 - DNA, 20 bp, Artificial Sequence
  chemically synthesized
gcatttttgatttttgatta

SEQ ID NO: 60264 - DNA, 20 bp, Artificial Sequence
  chemically synthesized
aatttgcatttttgattttt

SEQ ID NO: 60265 - DNA, 20 bp, Artificial Sequence
  chemically synthesized
aaatttgcatttttgatttt

SEQ ID NO: 60266 - DNA, 20 bp, Artificial Sequence
  chemically synthesized
taaatttgcatttttgattt

SEQ ID NO: 60267 - DNA, 20 bp, Artificial Sequence
  chemically synthesized
cttttaaatttgcatttttg

SEQ ID NO: 60268 - DNA, 20 bp, Artificial Sequence
  chemically synthesized
agcttacttttaaatttgca

SEQ ID NO: 60269 - DNA, 20 bp, Artificial Sequence
  chemically synthesized
aagcttacttttaaatttgc

SEQ ID NO: 60270 - DNA, 20 bp, Artificial Sequence
  chemically synthesized
tgtggcaatttaagcttact

SEQ ID NO: 60271 - DNA, 20 bp, Artificial Sequence
  chemically synthesized
atgtggcaatttaagcttac

SEQ ID NO: 60272 - DNA, 20 bp, Artificial Sequence
  chemically synthesized
atgatactaaccatctatca

SEQ ID NO: 60273 - DNA, 20 bp, Artificial Sequence
  chemically synthesized
tctattaatgatactaacca

SEQ ID NO: 60274 - DNA, 20 bp, Artificial Sequence
  chemically synthesized
atctattaatgatactaacc

SEQ ID NO: 60275 - DNA, 20 bp, Artificial Sequence
  chemically synthesized
taagagtcctttatctatta

SEQ ID NO: 60276 - DNA, 20 bp, Artificial Sequence
  chemically synthesized
ataagagtcctttatctatt

SEQ ID NO: 60277 - DNA, 20 bp, Artificial Sequence
  chemically synthesized
atgatttataagagtccttt

SEQ ID NO: 60278 - DNA, 20 bp, Artificial Sequence
  chemically synthesized
aatgatttataagagtcctt

SEQ ID NO: 60279 - DNA, 20 bp, Artificial Sequence
  chemically synthesized
taatgatttataagagtcct

SEQ ID NO: 60280 - DNA, 20 bp, Artificial Sequence
  chemically synthesized
ttaatgatttataagagtcc

SEQ ID NO: 60281 - DNA, 20 bp, Artificial Sequence
  chemically synthesized
tttaatgatttataagagtc

SEQ ID NO: 60282 - DNA, 20 bp, Artificial Sequence
  chemically synthesized
ttttaatgatttataagagt

SEQ ID NO: 60283 - DNA, 20 bp, Artificial Sequence
  chemically synthesized
tttttttaatgatttataag

SEQ ID NO: 60284 - DNA, 20 bp, Artificial Sequence
  chemically synthesized
gtttttttaatgatttataa

SEQ ID NO: 60285 - DNA, 20 bp, Artificial Sequence
  chemically synthesized
tgatatttgtttttttaatg

SEQ ID NO: 60286 - DNA, 20 bp, Artificial Sequence
  chemically synthesized
tattgtgatatttgtttttt

SEQ ID NO: 60287 - DNA, 20 bp, Artificial Sequence
  chemically synthesized
ctattgtgatatttgttttt

SEQ ID NO: 60288 - DNA, 20 bp, Artificial Sequence
  chemically synthesized
tctattgtgatatttgtttt

SEQ ID NO: 60289 - DNA, 20 bp, Artificial Sequence
  chemically synthesized
ttctattgtgatatttgttt

SEQ ID NO: 60290 - DNA, 20 bp, Artificial Sequence
  chemically synthesized
ctcatttttctattgtgata

SEQ ID NO: 60291 - DNA, 20 bp, Artificial Sequence
  chemically synthesized
gctcatttttctattgtgat

SEQ ID NO: 60292 - DNA, 20 bp, Artificial Sequence
  chemically synthesized
tgctcatttttctattgtga

SEQ ID NO: 60293 - DNA, 20 bp, Artificial Sequence
  chemically synthesized
ttgctcatttttctattgtg

SEQ ID NO: 60294 - DNA, 20 bp, Artificial Sequence
  chemically synthesized
tttgctcatttttctattgt

SEQ ID NO: 60295 - DNA, 20 bp, Artificial Sequence
  chemically synthesized
ttttgctcatttttctattg

SEQ ID NO: 60296 - DNA, 20 bp, Artificial Sequence
  chemically synthesized
ccaatttttttgctcatttt

SEQ ID NO: 60297 - DNA, 20 bp, Artificial Sequence
  chemically synthesized
cccaatttttttgctcattt

SEQ ID NO: 60298 - DNA, 20 bp, Artificial Sequence
  chemically synthesized
tcccaatttttttgctcatt

SEQ ID NO: 60299 - DNA, 20 bp, Artificial Sequence
  chemically synthesized
ttcccaatttttttgctcat

SEQ ID NO: 60300 - DNA, 20 bp, Artificial Sequence
  chemically synthesized
tgagatttttcccaattttt

SEQ ID NO: 60301 - DNA, 20 bp, Artificial Sequence
  chemically synthesized
atgagatttttcccaatttt

SEQ ID NO: 60302 - DNA, 20 bp, Artificial Sequence
  chemically synthesized
catactttatgagatttttc

SEQ ID NO: 60303 - DNA, 20 bp, Artificial Sequence
  chemically synthesized
tctattccatactttatgag

SEQ ID NO: 60304 - DNA, 20 bp, Artificial Sequence
  chemically synthesized
atctattccatactttatga

SEQ ID NO: 60305 - DNA, 20 bp, Artificial Sequence
  chemically synthesized
aatttatctattccatactt

SEQ ID NO: 60306 - DNA, 20 bp, Artificial Sequence
  chemically synthesized
ttgaatttatctattccata

SEQ ID NO: 60307 - DNA, 20 bp, Artificial Sequence
  chemically synthesized
attgaatttatctattccat

SEQ ID NO: 60308 - DNA, 20 bp, Artificial Sequence
  chemically synthesized
atatatttattgaatttatc

SEQ ID NO: 60309 - DNA, 20 bp, Artificial Sequence
  chemically synthesized
catatatttattgaatttat

SEQ ID NO: 60310 - DNA, 20 bp, Artificial Sequence
  chemically synthesized
tcatatatttattgaattta

SEQ ID NO: 60311 - DNA, 20 bp, Artificial Sequence
  chemically synthesized
attttcatatatttattgaa

SEQ ID NO: 60312 - DNA, 20 bp, Artificial Sequence
  chemically synthesized
gttcattttcatatatttat

SEQ ID NO: 60313 - DNA, 20 bp, Artificial Sequence
  chemically synthesized
ataattagttcattttcata

SEQ ID NO: 60314 - DNA, 20 bp, Artificial Sequence
  chemically synthesized
gataattagttcattttcat

SEQ ID NO: 60315 - DNA, 20 bp, Artificial Sequence
  chemically synthesized
tttgataattagttcatttt

SEQ ID NO: 60316 - DNA, 20 bp, Artificial Sequence
  chemically synthesized
atttgataattagttcattt

SEQ ID NO: 60317 - DNA, 20 bp, Artificial Sequence
  chemically synthesized
tatctgtatttatttgataa

SEQ ID NO: 60318 - DNA, 20 bp, Artificial Sequence
  chemically synthesized
atatctgtatttatttgata

SEQ ID NO: 60319 - DNA, 20 bp, Artificial Sequence
  chemically synthesized
ctatttatatctgtatttat

SEQ ID NO: 60320 - DNA, 20 bp, Artificial Sequence
  chemically synthesized
acagataaaaagaagtccat

SEQ ID NO: 60321 - DNA, 20 bp, Artificial Sequence
  chemically synthesized
gacagataaaaagaagtcca

SEQ ID NO: 60322 - DNA, 20 bp, Artificial Sequence
  chemically synthesized
aaaaaaaaccactctatcaa

SEQ ID NO: 60323 - DNA, 20 bp, Artificial Sequence
  chemically synthesized
agattaaaaaaaaaccactc

SEQ ID NO: 60324 - DNA, 20 bp, Artificial Sequence
  chemically synthesized
aagattaaaaaaaaaccact

SEQ ID NO: 60325 - DNA, 20 bp, Artificial Sequence
  chemically synthesized
tctttaagattaaaaaaaaa

SEQ ID NO: 60326 - DNA, 20 bp, Artificial Sequence
  chemically synthesized
tgaatagtgataaagagaca

SEQ ID NO: 60327 - DNA, 20 bp, Artificial Sequence
  chemically synthesized
cattgtgaatagtgataaag

SEQ ID NO: 60328 - DNA, 20 bp, Artificial Sequence
  chemically synthesized
acattgtgaatagtgataaa

SEQ ID NO: 60329 - DNA, 20 bp, Artificial Sequence
  chemically synthesized
tacattgtgaatagtgataa

SEQ ID NO: 60330 - DNA, 20 bp, Artificial Sequence
  chemically synthesized
tctccagaaagacgccattt

SEQ ID NO: 60331 - DNA, 20 bp, Artificial Sequence
  chemically synthesized
ctctccagaaagacgccatt

SEQ ID NO: 60332 - DNA, 20 bp, Artificial Sequence
  chemically synthesized
gtgagcaggaatcatttctc

SEQ ID NO: 60333 - DNA, 20 bp, Artificial Sequence
  chemically synthesized
ggttagtgagcaggaatcat

SEQ ID NO: 60334 - DNA, 20 bp, Artificial Sequence
  chemically synthesized
ggttaggttagtgagcagga

SEQ ID NO: 60335 - DNA, 20 bp, Artificial Sequence
  chemically synthesized
aggggagatgaaaggttagg

SEQ ID NO: 60336 - DNA, 20 bp, Artificial Sequence
  chemically synthesized
acatattaaggggagatgaa

SEQ ID NO: 60337 - DNA, 20 bp, Artificial Sequence
  chemically synthesized
cacatattaaggggagatga

SEQ ID NO: 60338 - DNA, 20 bp, Artificial Sequence
  chemically synthesized
tctctatcctttcacatatt

SEQ ID NO: 60339 - DNA, 20 bp, Artificial Sequence
  chemically synthesized
ctctctatcctttcacatat

SEQ ID NO: 60340 - DNA, 20 bp, Artificial Sequence
  chemically synthesized
tctctctatcctttcacata

SEQ ID NO: 60341 - DNA, 20 bp, Artificial Sequence
  chemically synthesized
ttttctctctatcctttcac

SEQ ID NO: 60342 - DNA, 20 bp, Artificial Sequence
  chemically synthesized
ttcttttctctctatccttt

SEQ ID NO: 60343 - DNA, 20 bp, Artificial Sequence
  chemically synthesized
aatatcttcttcttttctct

SEQ ID NO: 60344 - DNA, 20 bp, Artificial Sequence
  chemically synthesized
cacacttcaatatcttcttc

SEQ ID NO: 60345 - DNA, 20 bp, Artificial Sequence
  chemically synthesized
ccacacttcaatatcttctt

SEQ ID NO: 60346 - DNA, 20 bp, Artificial Sequence
  chemically synthesized
ggcactgcccaggatctccc

SEQ ID NO: 60347 - DNA, 20 bp, Artificial Sequence
  chemically synthesized
aggtgagttaggcactgccc

SEQ ID NO: 60348 - DNA, 20 bp, Artificial Sequence
  chemically synthesized
ttcaggtgagttaggcactg

SEQ ID NO: 60349 - DNA, 20 bp, Artificial Sequence
  chemically synthesized
tgagtggtcaaggaggagag

SEQ ID NO: 60350 - DNA, 20 bp, Artificial Sequence
  chemically synthesized
taaaggatgttgtgagtggt

SEQ ID NO: 60351 - DNA, 20 bp, Artificial Sequence
  chemically synthesized
gggacagaatctgagcttat

SEQ ID NO: 60352 - DNA, 20 bp, Artificial Sequence
  chemically synthesized
gaataaggagctctgatacg

SEQ ID NO: 60353 - DNA, 20 bp, Artificial Sequence
  chemically synthesized
ttagaataaggagctctgat

SEQ ID NO: 60354 - DNA, 20 bp, Artificial Sequence
  chemically synthesized
gttagaataaggagctctga

SEQ ID NO: 60355 - DNA, 20 bp, Artificial Sequence
  chemically synthesized
tctcgtatttgttagaataa

SEQ ID NO: 60356 - DNA, 20 bp, Artificial Sequence
  chemically synthesized
tctgaagttgtctcgtattt

SEQ ID NO: 60357 - DNA, 20 bp, Artificial Sequence
  chemically synthesized
gtcccataagcattctctga

SEQ ID NO: 60358 - DNA, 20 bp, Artificial Sequence
  chemically synthesized
agtcccataagcattctctg

SEQ ID NO: 60359 - DNA, 20 bp, Artificial Sequence
  chemically synthesized
ctttagtcccataagcattc

SEQ ID NO: 60360 - DNA, 20 bp, Artificial Sequence
  chemically synthesized
ggattcctttagtcccataa

SEQ ID NO: 60361 - DNA, 20 bp, Artificial Sequence
  chemically synthesized
aattgggattcctttagtcc

SEQ ID NO: 60362 - DNA, 20 bp, Artificial Sequence
  chemically synthesized
caattgggattcctttagtc

SEQ ID NO: 60363 - DNA, 20 bp, Artificial Sequence
  chemically synthesized
cctaaatctcccaaatcatt

SEQ ID NO: 60364 - DNA, 20 bp, Artificial Sequence
  chemically synthesized
ggatgggaaaagaggtgttg

SEQ ID NO: 60365 - DNA, 20 bp, Artificial Sequence
  chemically synthesized
ttaggatgggaaaagaggtg

SEQ ID NO: 60366 - DNA, 20 bp, Artificial Sequence
  chemically synthesized
cattcttaggatgggaaaag

SEQ ID NO: 60367 - DNA, 20 bp, Artificial Sequence
  chemically synthesized
acatgctagagagtagagtg

SEQ ID NO: 60368 - DNA, 20 bp, Artificial Sequence
  chemically synthesized
tgctggataaattcacatgc

SEQ ID NO: 60369 - DNA, 20 bp, Artificial Sequence
  chemically synthesized
gtgctggataaattcacatg

SEQ ID NO: 60370 - DNA, 20 bp, Artificial Sequence
  chemically synthesized
tctgcaggagtgtcagcttt

SEQ ID NO: 60371 - DNA, 20 bp, Artificial Sequence
  chemically synthesized
ctctgcaggagtgtcagctt

SEQ ID NO: 60372 - DNA, 20 bp, Artificial Sequence
  chemically synthesized
gagctttctctgcaggagtg

SEQ ID NO: 60373 - DNA, 20 bp, Artificial Sequence
  chemically synthesized
ctgccggttggagctttctc

SEQ ID NO: 60374 - DNA, 20 bp, Artificial Sequence
  chemically synthesized
atctcatacattgctgccgg

SEQ ID NO: 60375 - DNA, 20 bp, Artificial Sequence
  chemically synthesized
aatctcatacattgctgccg

SEQ ID NO: 60376 - DNA, 20 bp, Artificial Sequence
  chemically synthesized
aaatagtgatcagggatgga

SEQ ID NO: 60377 - DNA, 20 bp, Artificial Sequence
  chemically synthesized
aaaatagtgatcagggatgg

SEQ ID NO: 60378 - DNA, 20 bp, Artificial Sequence
  chemically synthesized
actccagaagcctttaaaat

SEQ ID NO: 60379 - DNA, 20 bp, Artificial Sequence
  chemically synthesized
gactccattcactccagaag

SEQ ID NO: 60380 - DNA, 20 bp, Artificial Sequence
  chemically synthesized
tgaagtaataacttggactc

SEQ ID NO: 60381 - DNA, 20 bp, Artificial Sequence
  chemically synthesized
atctctggagttctgaagta

SEQ ID NO: 60382 - DNA, 20 bp, Artificial Sequence
  chemically synthesized
ttgatctctggagttctgaa

SEQ ID NO: 60383 - DNA, 20 bp, Artificial Sequence
  chemically synthesized
cctgagctattattgatctc

SEQ ID NO: 60384 - DNA, 20 bp, Artificial Sequence
  chemically synthesized
cttacctgagctattattga

SEQ ID NO: 60385 - DNA, 20 bp, Artificial Sequence
  chemically synthesized
acatgcaaagcactctgagg

SEQ ID NO: 60386 - DNA, 20 bp, Artificial Sequence
  chemically synthesized
gacatgcaaagcactctgag

SEQ ID NO: 60387 - DNA, 20 bp, Artificial Sequence
  chemically synthesized
ctcccacactttgacatgca

SEQ ID NO: 60388 - DNA, 20 bp, Artificial Sequence
  chemically synthesized
ctctcacttgctcccacact

SEQ ID NO: 60389 - DNA, 20 bp, Artificial Sequence
  chemically synthesized
aacaatcttcctctcacttg

SEQ ID NO: 60390 - DNA, 20 bp, Artificial Sequence
  chemically synthesized
caacaatcttcctctcactt

SEQ ID NO: 60391 - DNA, 20 bp, Artificial Sequence
  chemically synthesized
gtttcaacaatcttcctctc

SEQ ID NO: 60392 - DNA, 20 bp, Artificial Sequence
  chemically synthesized
caggttagtttcaacaatct

SEQ ID NO: 60393 - DNA, 20 bp, Artificial Sequence
  chemically synthesized
gcaggttagtttcaacaatc

SEQ ID NO: 60394 - DNA, 20 bp, Artificial Sequence
  chemically synthesized
tgcaggttagtttcaacaat

SEQ ID NO: 60395 - DNA, 20 bp, Artificial Sequence
  chemically synthesized
tccaaagaaagtgtaagagt

SEQ ID NO: 60396 - DNA, 20 bp, Artificial Sequence
  chemically synthesized
acaaaaggcgcaaagacagc

SEQ ID NO: 60397 - DNA, 20 bp, Artificial Sequence
  chemically synthesized
ttcacaaaaggcgcaaagac

SEQ ID NO: 60398 - DNA, 20 bp, Artificial Sequence
  chemically synthesized
ttcttcacaaaaggcgcaaa

SEQ ID NO: 60399 - DNA, 20 bp, Artificial Sequence
  chemically synthesized
cttgttcttcacaaaaggcg

SEQ ID NO: 60400 - DNA, 20 bp, Artificial Sequence
  chemically synthesized
tcagctaataaggaccccac

SEQ ID NO: 60401 - DNA, 20 bp, Artificial Sequence
  chemically synthesized
tactaattctcagctaataa

SEQ ID NO: 60402 - DNA, 20 bp, Artificial Sequence
  chemically synthesized
caggaatacagatggcttgt

SEQ ID NO: 60403 - DNA, 20 bp, Artificial Sequence
  chemically synthesized
aaaatgtatggcagcttcca

SEQ ID NO: 60404 - DNA, 20 bp, Artificial Sequence
  chemically synthesized
ttcaaaatgtatggcagctt

SEQ ID NO: 60405 - DNA, 20 bp, Artificial Sequence
  chemically synthesized
gttcaaaatgtatggcagct

SEQ ID NO: 60406 - DNA, 20 bp, Artificial Sequence
  chemically synthesized
tgttcaaaatgtatggcagc

SEQ ID NO: 60407 - DNA, 20 bp, Artificial Sequence
  chemically synthesized
actggacgtagtgggtgggg

SEQ ID NO: 60408 - DNA, 20 bp, Artificial Sequence
  chemically synthesized
gttaactggacgtagtgggt

SEQ ID NO: 60409 - DNA, 20 bp, Artificial Sequence
  chemically synthesized
gggtcccaggctaaattggt

SEQ ID NO: 60410 - DNA, 20 bp, Artificial Sequence
  chemically synthesized
gagacagcagccattggggt

SEQ ID NO: 60411 - DNA, 20 bp, Artificial Sequence
  chemically synthesized
aaggggccttagagacagca

SEQ ID NO: 60412 - DNA, 20 bp, Artificial Sequence
  chemically synthesized
ttaaaggggccttagagaca

SEQ ID NO: 60413 - DNA, 20 bp, Artificial Sequence
  chemically synthesized
cctgcatacctgacaccaat

SEQ ID NO: 60414 - DNA, 20 bp, Artificial Sequence
  chemically synthesized
tggaaaaggagacataggac

SEQ ID NO: 60415 - DNA, 20 bp, Artificial Sequence
  chemically synthesized
atccttctggaaaaggagac

SEQ ID NO: 60416 - DNA, 20 bp, Artificial Sequence
  chemically synthesized
cagtcccaaagacatcttca

SEQ ID NO: 60417 - DNA, 20 bp, Artificial Sequence
  chemically synthesized
tcagttccagtcccaaagac

SEQ ID NO: 60418 - DNA, 20 bp, Artificial Sequence
  chemically synthesized
ctacacattctcagttccag

SEQ ID NO: 60419 - DNA, 20 bp, Artificial Sequence
  chemically synthesized
gggaggagatgtctcagttc

SEQ ID NO: 60420 - DNA, 20 bp, Artificial Sequence
  chemically synthesized
agggaggagatgtctcagtt

SEQ ID NO: 60421 - DNA, 20 bp, Artificial Sequence
  chemically synthesized
tagggaggagatgtctcagt

SEQ ID NO: 60422 - DNA, 20 bp, Artificial Sequence
  chemically synthesized
caaattttagggaggagatg

SEQ ID NO: 60423 - DNA, 20 bp, Artificial Sequence
  chemically synthesized
acccctgttgcaaattttag

SEQ ID NO: 60424 - DNA, 20 bp, Artificial Sequence
  chemically synthesized
taccaaggaaaagaagccag

SEQ ID NO: 60425 - DNA, 20 bp, Artificial Sequence
  chemically synthesized
ctaccaaggaaaagaagcca

SEQ ID NO: 60426 - DNA, 20 bp, Artificial Sequence
  chemically synthesized
actttctaccaaggaaaaga

SEQ ID NO: 60427 - DNA, 20 bp, Artificial Sequence
  chemically synthesized
ttgactttctaccaaggaaa

SEQ ID NO: 60428 - DNA, 20 bp, Artificial Sequence
  chemically synthesized
ccttcttgactttctaccaa

SEQ ID NO: 60429 - DNA, 20 bp, Artificial Sequence
  chemically synthesized
aaatgtaaacgtgatctagc

SEQ ID NO: 60430 - DNA, 20 bp, Artificial Sequence
  chemically synthesized
ggtgaccaggcccagagcat

SEQ ID NO: 60431 - DNA, 20 bp, Artificial Sequence
  chemically synthesized
acttgggtgaccaggcccag

SEQ ID NO: 60432 - DNA, 20 bp, Artificial Sequence
  chemically synthesized
aaaggcattgacttgggtga

SEQ ID NO: 60433 - DNA, 20 bp, Artificial Sequence
  chemically synthesized
aaaaggcattgacttgggtg

SEQ ID NO: 60434 - DNA, 20 bp, Artificial Sequence
  chemically synthesized
gtttaaaaggcattgacttg

SEQ ID NO: 60435 - DNA, 20 bp, Artificial Sequence
  chemically synthesized
ggtttaaaaggcattgactt

SEQ ID NO: 60436 - DNA, 20 bp, Artificial Sequence
  chemically synthesized
tggtttaaaaggcattgact

SEQ ID NO: 60437 - DNA, 20 bp, Artificial Sequence
  chemically synthesized
tggagggattttggtttaaa

SEQ ID NO: 60438 - DNA, 20 bp, Artificial Sequence
  chemically synthesized
atggagggattttggtttaa

SEQ ID NO: 60439 - DNA, 20 bp, Artificial Sequence
  chemically synthesized
acagctttatggagggattt

SEQ ID NO: 60440 - DNA, 20 bp, Artificial Sequence
  chemically synthesized
gacagctttatggagggatt

SEQ ID NO: 60441 - DNA, 20 bp, Artificial Sequence
  chemically synthesized
agagacatatttgacagctt

SEQ ID NO: 60442 - DNA, 20 bp, Artificial Sequence
  chemically synthesized
agttaagagacatatttgac

SEQ ID NO: 60443 - DNA, 20 bp, Artificial Sequence
  chemically synthesized
cagttaagagacatatttga

SEQ ID NO: 60444 - DNA, 20 bp, Artificial Sequence
  chemically synthesized
tcagttaagagacatatttg

SEQ ID NO: 60445 - DNA, 20 bp, Artificial Sequence
  chemically synthesized
cttttcagttaagagacata

SEQ ID NO: 60446 - DNA, 20 bp, Artificial Sequence
  chemically synthesized
ctgaaagttgcttttcagtt

SEQ ID NO: 60447 - DNA, 20 bp, Artificial Sequence
  chemically synthesized
cctgaaagttgcttttcagt

SEQ ID NO: 60448 - DNA, 20 bp, Artificial Sequence
  chemically synthesized
tttcctgaaagttgcttttc

SEQ ID NO: 60449 - DNA, 20 bp, Artificial Sequence
  chemically synthesized
ttatttcctgaaagttgctt

SEQ ID NO: 60450 - DNA, 20 bp, Artificial Sequence
  chemically synthesized
gtaatgtgggcccacttatt

SEQ ID NO: 60451 - DNA, 20 bp, Artificial Sequence
  chemically synthesized
cttagtaatgtgggcccact

SEQ ID NO: 60452 - DNA, 20 bp, Artificial Sequence
  chemically synthesized
acttagtaatgtgggcccac

SEQ ID NO: 60453 - DNA, 20 bp, Artificial Sequence
  chemically synthesized
catttacttagtaatgtggg

SEQ ID NO: 60454 - DNA, 20 bp, Artificial Sequence
  chemically synthesized
gcatttacttagtaatgtgg

SEQ ID NO: 60455 - DNA, 20 bp, Artificial Sequence
  chemically synthesized
agtagccatgcagtgggggt

SEQ ID NO: 60456 - DNA, 20 bp, Artificial Sequence
  chemically synthesized
tggtgagcattcagtagcca

SEQ ID NO: 60457 - DNA, 20 bp, Artificial Sequence
  chemically synthesized
gtaagataggatccatctcc

SEQ ID NO: 60458 - DNA, 20 bp, Artificial Sequence
  chemically synthesized
cataacacacaggccaagat

SEQ ID NO: 60459 - DNA, 20 bp, Artificial Sequence
  chemically synthesized
ccataacacacaggccaaga

SEQ ID NO: 60460 - DNA, 20 bp, Artificial Sequence
  chemically synthesized
tccataacacacaggccaag

SEQ ID NO: 60461 - DNA, 20 bp, Artificial Sequence
  chemically synthesized
ttccataacacacaggccaa

SEQ ID NO: 60462 - DNA, 20 bp, Artificial Sequence
  chemically synthesized
tttccataacacacaggcca

SEQ ID NO: 60463 - DNA, 20 bp, Artificial Sequence
  chemically synthesized
ttttccataacacacaggcc

SEQ ID NO: 60464 - DNA, 20 bp, Artificial Sequence
  chemically synthesized
aagaaggtcacctttttttc

SEQ ID NO: 60465 - DNA, 20 bp, Artificial Sequence
  chemically synthesized
gttgaagaaggtcacctttt

SEQ ID NO: 60466 - DNA, 20 bp, Artificial Sequence
  chemically synthesized
ttagttgaagaaggtcacct

SEQ ID NO: 60467 - DNA, 20 bp, Artificial Sequence
  chemically synthesized
attagttgaagaaggtcacc

SEQ ID NO: 60468 - DNA, 20 bp, Artificial Sequence
  chemically synthesized
agctctgactgtccgtgatc

SEQ ID NO: 60469 - DNA, 20 bp, Artificial Sequence
  chemically synthesized
tcatcaataaatggggctta

SEQ ID NO: 60470 - DNA, 20 bp, Artificial Sequence
  chemically synthesized
ctcatcaataaatggggctt

SEQ ID NO: 60471 - DNA, 20 bp, Artificial Sequence
  chemically synthesized
tctcatcaataaatggggct

SEQ ID NO: 60472 - DNA, 20 bp, Artificial Sequence
  chemically synthesized
tggttttctcatcaataaat

SEQ ID NO: 60473 - DNA, 20 bp, Artificial Sequence
  chemically synthesized
gtggttttctcatcaataaa

SEQ ID NO: 60474 - DNA, 20 bp, Artificial Sequence
  chemically synthesized
atcccctttgtggttttctc

SEQ ID NO: 60475 - DNA, 20 bp, Artificial Sequence
  chemically synthesized
gtgaaatgccttaatcccct

SEQ ID NO: 60476 - DNA, 20 bp, Artificial Sequence
  chemically synthesized
gctgaggatagatagggata

SEQ ID NO: 60477 - DNA, 20 bp, Artificial Sequence
  chemically synthesized
actgtggaaattcgctgagg

SEQ ID NO: 60478 - DNA, 20 bp, Artificial Sequence
  chemically synthesized
tgaaattaactgtggaaatt

SEQ ID NO: 60479 - DNA, 20 bp, Artificial Sequence
  chemically synthesized
cctcttatgaaattaactgt

SEQ ID NO: 60480 - DNA, 20 bp, Artificial Sequence
  chemically synthesized
gcctcttatgaaattaactg

SEQ ID NO: 60481 - DNA, 20 bp, Artificial Sequence
  chemically synthesized
tgcctcttatgaaattaact

SEQ ID NO: 60482 - DNA, 20 bp, Artificial Sequence
  chemically synthesized
ttgcctcttatgaaattaac

SEQ ID NO: 60483 - DNA, 20 bp, Artificial Sequence
  chemically synthesized
atatctttttgcctcttatg

SEQ ID NO: 60484 - DNA, 20 bp, Artificial Sequence
  chemically synthesized
cctaatgtccagttaatatc

SEQ ID NO: 60485 - DNA, 20 bp, Artificial Sequence
  chemically synthesized
gcctaatgtccagttaatat

SEQ ID NO: 60486 - DNA, 20 bp, Artificial Sequence
  chemically synthesized
gggacagcgtttgcctaatg

SEQ ID NO: 60487 - DNA, 20 bp, Artificial Sequence
  chemically synthesized
ggggacagcgtttgcctaat

SEQ ID NO: 60488 - DNA, 20 bp, Artificial Sequence
  chemically synthesized
ctttggggacagcgtttgcc

SEQ ID NO: 60489 - DNA, 20 bp, Artificial Sequence
  chemically synthesized
ttactttggggacagcgttt

SEQ ID NO: 60490 - DNA, 20 bp, Artificial Sequence
  chemically synthesized
cggaattcttactttgggga

SEQ ID NO: 60491 - DNA, 20 bp, Artificial Sequence
  chemically synthesized
cattacggaattcttacttt

SEQ ID NO: 60492 - DNA, 20 bp, Artificial Sequence
  chemically synthesized
ggaaacattgcattacggaa

SEQ ID NO: 60493 - DNA, 20 bp, Artificial Sequence
  chemically synthesized
ggagatactggaagaaaagc

SEQ ID NO: 60494 - DNA, 20 bp, Artificial Sequence
  chemically synthesized
aggagatactggaagaaaag

SEQ ID NO: 60495 - DNA, 20 bp, Artificial Sequence
  chemically synthesized
tgcaacctttaggagatact

SEQ ID NO: 60496 - DNA, 20 bp, Artificial Sequence
  chemically synthesized
ccatgaatgatggcttctgc

SEQ ID NO: 60497 - DNA, 20 bp, Artificial Sequence
  chemically synthesized
gccatgaatgatggcttctg

SEQ ID NO: 60498 - DNA, 20 bp, Artificial Sequence
  chemically synthesized
tgcatttgccatgaatgatg

SEQ ID NO: 60499 - DNA, 20 bp, Artificial Sequence
  chemically synthesized
aagtacattgtgcatttgcc

SEQ ID NO: 60500 - DNA, 20 bp, Artificial Sequence
  chemically synthesized
aagtcaagacttcaagtaca

SEQ ID NO: 60501 - DNA, 20 bp, Artificial Sequence
  chemically synthesized
tatgcttaaagtcaagactt

SEQ ID NO: 60502 - DNA, 20 bp, Artificial Sequence
  chemically synthesized
atatgcttaaagtcaagact

SEQ ID NO: 60503 - DNA, 20 bp, Artificial Sequence
  chemically synthesized
gtataaaaaatcccatgaat

SEQ ID NO: 60504 - DNA, 20 bp, Artificial Sequence
  chemically synthesized
gcatggattagtataaaaaa

SEQ ID NO: 60505 - DNA, 20 bp, Artificial Sequence
  chemically synthesized
tgatgaaacaaacatagcct

SEQ ID NO: 60506 - DNA, 20 bp, Artificial Sequence
  chemically synthesized
atgatgaaacaaacatagcc

SEQ ID NO: 60507 - DNA, 20 bp, Artificial Sequence
  chemically synthesized
tatgatgaaacaaacatagc

SEQ ID NO: 60508 - DNA, 20 bp, Artificial Sequence
  chemically synthesized
ttatgatgaaacaaacatag

SEQ ID NO: 60509 - DNA, 20 bp, Artificial Sequence
  chemically synthesized
aaacatcatttttatgatga

SEQ ID NO: 60510 - DNA, 20 bp, Artificial Sequence
  chemically synthesized
aaaacatcatttttatgatg

SEQ ID NO: 60511 - DNA, 20 bp, Artificial Sequence
  chemically synthesized
acaagtgcatgtttaaaaca

SEQ ID NO: 60512 - DNA, 20 bp, Artificial Sequence
  chemically synthesized
aacaagtgcatgtttaaaac

SEQ ID NO: 60513 - DNA, 20 bp, Artificial Sequence
  chemically synthesized
tcctagaatagtaagtaatt

SEQ ID NO: 60514 - DNA, 20 bp, Artificial Sequence
  chemically synthesized
tgccaagggcattctcctag

SEQ ID NO: 60515 - DNA, 20 bp, Artificial Sequence
  chemically synthesized
taatcctggggatatgtagc

SEQ ID NO: 60516 - DNA, 20 bp, Artificial Sequence
  chemically synthesized
gtaatcctggggatatgtag

SEQ ID NO: 60517 - DNA, 20 bp, Artificial Sequence
  chemically synthesized
gggtatttgtaatcctgggg

SEQ ID NO: 60518 - DNA, 20 bp, Artificial Sequence
  chemically synthesized
aaattagggtatttgtaatc

SEQ ID NO: 60519 - DNA, 20 bp, Artificial Sequence
  chemically synthesized
caaattagggtatttgtaat

SEQ ID NO: 60520 - DNA, 20 bp, Artificial Sequence
  chemically synthesized
tcaaattagggtatttgtaa

SEQ ID NO: 60521 - DNA, 20 bp, Artificial Sequence
  chemically synthesized
caggcagtacttttcaaatt

SEQ ID NO: 60522 - DNA, 20 bp, Artificial Sequence
  chemically synthesized
ccaggcagtacttttcaaat

SEQ ID NO: 60523 - DNA, 20 bp, Artificial Sequence
  chemically synthesized
gtactttccaggcagtactt

SEQ ID NO: 60524 - DNA, 20 bp, Artificial Sequence
  chemically synthesized
cttagtactttccaggcagt

SEQ ID NO: 60525 - DNA, 20 bp, Artificial Sequence
  chemically synthesized
cccagggaaattgcttagta

SEQ ID NO: 60526 - DNA, 20 bp, Artificial Sequence
  chemically synthesized
aaattacccagggaaattgc

SEQ ID NO: 60527 - DNA, 20 bp, Artificial Sequence
  chemically synthesized
caaattacccagggaaattg

SEQ ID NO: 60528 - DNA, 20 bp, Artificial Sequence
  chemically synthesized
tcaaattacccagggaaatt

SEQ ID NO: 60529 - DNA, 20 bp, Artificial Sequence
  chemically synthesized
gtggaagtgggggaatattt

SEQ ID NO: 60530 - DNA, 20 bp, Artificial Sequence
  chemically synthesized
ggtggaagtgggggaatatt

SEQ ID NO: 60531 - DNA, 20 bp, Artificial Sequence
  chemically synthesized
tggtggaagtgggggaatat

SEQ ID NO: 60532 - DNA, 20 bp, Artificial Sequence
  chemically synthesized
ctgacagcaactctggcagc

SEQ ID NO: 60533 - DNA, 20 bp, Artificial Sequence
  chemically synthesized
actgacagcaactctggcag

SEQ ID NO: 60534 - DNA, 20 bp, Artificial Sequence
  chemically synthesized
tctttactgacagcaactct

SEQ ID NO: 60535 - DNA, 20 bp, Artificial Sequence
  chemically synthesized
ttctctttactgacagcaac

SEQ ID NO: 60536 - DNA, 20 bp, Artificial Sequence
  chemically synthesized
cttctctttactgacagcaa

SEQ ID NO: 60537 - DNA, 20 bp, Artificial Sequence
  chemically synthesized
tttcttctctttactgacag

SEQ ID NO: 60538 - DNA, 20 bp, Artificial Sequence
  chemically synthesized
atttcttctctttactgaca

SEQ ID NO: 60539 - DNA, 20 bp, Artificial Sequence
  chemically synthesized
tatttcttctctttactgac

SEQ ID NO: 60540 - DNA, 20 bp, Artificial Sequence
  chemically synthesized
ttatttcttctctttactga

SEQ ID NO: 60541 - DNA, 20 bp, Artificial Sequence
  chemically synthesized
tctttttatttcttctcttt

SEQ ID NO: 60542 - DNA, 20 bp, Artificial Sequence
  chemically synthesized
agtgttgtctttttatttct

SEQ ID NO: 60543 - DNA, 20 bp, Artificial Sequence
  chemically synthesized
aagtgttgtctttttatttc

SEQ ID NO: 60544 - DNA, 20 bp, Artificial Sequence
  chemically synthesized
ctcccaatttaagtgttgtc

SEQ ID NO: 60545 - DNA, 20 bp, Artificial Sequence
  chemically synthesized
actcccaatttaagtgttgt

SEQ ID NO: 60546 - DNA, 20 bp, Artificial Sequence
  chemically synthesized
tttactcccaatttaagtgt

SEQ ID NO: 60547 - DNA, 20 bp, Artificial Sequence
  chemically synthesized
accccgttgtttactcccaa

SEQ ID NO: 60548 - DNA, 20 bp, Artificial Sequence
  chemically synthesized
aaccccgttgtttactccca

SEQ ID NO: 60549 - DNA, 20 bp, Artificial Sequence
  chemically synthesized
gtgcagctatggaagtaaat

SEQ ID NO: 60550 - DNA, 20 bp, Artificial Sequence
  chemically synthesized
ggtgcagctatggaagtaaa

SEQ ID NO: 60551 - DNA, 20 bp, Artificial Sequence
  chemically synthesized
tggtgcagctatggaagtaa

SEQ ID NO: 60552 - DNA, 20 bp, Artificial Sequence
  chemically synthesized
caaggaggtaattttggtgc

SEQ ID NO: 60553 - DNA, 20 bp, Artificial Sequence
  chemically synthesized
tgtgaacaagacatgacaat

SEQ ID NO: 60554 - DNA, 20 bp, Artificial Sequence
  chemically synthesized
gaccagagaccacagatatc

SEQ ID NO: 60555 - DNA, 20 bp, Artificial Sequence
  chemically synthesized
aaggaggggttggaccagag

SEQ ID NO: 60556 - DNA, 20 bp, Artificial Sequence
  chemically synthesized
tctgggcctcggggccctat

SEQ ID NO: 60557 - DNA, 20 bp, Artificial Sequence
  chemically synthesized
ctctgggcctcggggcccta

SEQ ID NO: 60558 - DNA, 20 bp, Artificial Sequence
  chemically synthesized
ggtgggtgaccatggtcaag

SEQ ID NO: 60559 - DNA, 20 bp, Artificial Sequence
  chemically synthesized
gctctaacacaattaggtgg

SEQ ID NO: 60560 - DNA, 20 bp, Artificial Sequence
  chemically synthesized
tagtcttggctctaacacaa

SEQ ID NO: 60561 - DNA, 20 bp, Artificial Sequence
  chemically synthesized
ctagtcttggctctaacaca

SEQ ID NO: 60562 - DNA, 20 bp, Artificial Sequence
  chemically synthesized
gaatcagaagaacagatttc

SEQ ID NO: 60563 - DNA, 20 bp, Artificial Sequence
  chemically synthesized
tgagcttggaatcagaagaa

SEQ ID NO: 60564 - DNA, 20 bp, Artificial Sequence
  chemically synthesized
ttctgagcttggaatcagaa

SEQ ID NO: 60565 - DNA, 20 bp, Artificial Sequence
  chemically synthesized
ccacttattctgagcttgga

SEQ ID NO: 60566 - DNA, 20 bp, Artificial Sequence
  chemically synthesized
atagatgaagtgaatggcag

SEQ ID NO: 60567 - DNA, 20 bp, Artificial Sequence
  chemically synthesized
atcctgaaatcagagaacat

SEQ ID NO: 60568 - DNA, 20 bp, Artificial Sequence
  chemically synthesized
tgatcggggagactgggcca

SEQ ID NO: 60569 - DNA, 20 bp, Artificial Sequence
  chemically synthesized
ttatgatcggggagactggg

SEQ ID NO: 60570 - DNA, 20 bp, Artificial Sequence
  chemically synthesized
cagagtcttcttatgatcgg

SEQ ID NO: 60571 - DNA, 20 bp, Artificial Sequence
  chemically synthesized
caaagatgttccagagtctt

SEQ ID NO: 60572 - DNA, 20 bp, Artificial Sequence
  chemically synthesized
ttacaaagatgttccagagt

SEQ ID NO: 60573 - DNA, 20 bp, Artificial Sequence
  chemically synthesized
cttacaaagatgttccagag

SEQ ID NO: 60574 - DNA, 20 bp, Artificial Sequence
  chemically synthesized
gtttcttacaaagatgttcc

SEQ ID NO: 60575 - DNA, 20 bp, Artificial Sequence
  chemically synthesized
ttggtttcttacaaagatgt

SEQ ID NO: 60576 - DNA, 20 bp, Artificial Sequence
  chemically synthesized
cttggtttcttacaaagatg

SEQ ID NO: 60577 - DNA, 20 bp, Artificial Sequence
  chemically synthesized
tcttggtttcttacaaagat

SEQ ID NO: 60578 - DNA, 20 bp, Artificial Sequence
  chemically synthesized
agcaccaaaaacactcactt

SEQ ID NO: 60579 - DNA, 20 bp, Artificial Sequence
  chemically synthesized
aagcaccaaaaacactcact

SEQ ID NO: 60580 - DNA, 20 bp, Artificial Sequence
  chemically synthesized
taagcaccaaaaacactcac

SEQ ID NO: 60581 - DNA, 20 bp, Artificial Sequence
  chemically synthesized
ttaagcaccaaaaacactca

SEQ ID NO: 60582 - DNA, 20 bp, Artificial Sequence
  chemically synthesized
ccaacacaacactttttaag

SEQ ID NO: 60583 - DNA, 20 bp, Artificial Sequence
  chemically synthesized
gccactgggatgttgccaac

SEQ ID NO: 60584 - DNA, 20 bp, Artificial Sequence
  chemically synthesized
ttggccactgggatgttgcc

SEQ ID NO: 60585 - DNA, 20 bp, Artificial Sequence
  chemically synthesized
tcctggaatatcattcttgg

SEQ ID NO: 60586 - DNA, 20 bp, Artificial Sequence
  chemically synthesized
cttgtcctggaatatcattc

SEQ ID NO: 60587 - DNA, 20 bp, Artificial Sequence
  chemically synthesized
aactgttccttgtcctggaa

SEQ ID NO: 60588 - DNA, 20 bp, Artificial Sequence
  chemically synthesized
caggatgaatcaaataccaa

SEQ ID NO: 60589 - DNA, 20 bp, Artificial Sequence
  chemically synthesized
ggagggaccctagttacagg

SEQ ID NO: 60590 - DNA, 20 bp, Artificial Sequence
  chemically synthesized
cctactgcagctagggtctt

SEQ ID NO: 60591 - DNA, 20 bp, Artificial Sequence
  chemically synthesized
agttccctactgcagctagg

SEQ ID NO: 60592 - DNA, 20 bp, Artificial Sequence
  chemically synthesized
cagttccctactgcagctag

SEQ ID NO: 60593 - DNA, 20 bp, Artificial Sequence
  chemically synthesized
tttcagttccctactgcagc

SEQ ID NO: 60594 - DNA, 20 bp, Artificial Sequence
  chemically synthesized
tgagatgtgtatcttatttc

SEQ ID NO: 60595 - DNA, 20 bp, Artificial Sequence
  chemically synthesized
aagtgaccactggctgtgcc

SEQ ID NO: 60596 - DNA, 20 bp, Artificial Sequence
  chemically synthesized
aagacttgaagtgaccactg

SEQ ID NO: 60597 - DNA, 20 bp, Artificial Sequence
  chemically synthesized
tgagacacttcaagacttga

SEQ ID NO: 60598 - DNA, 20 bp, Artificial Sequence
  chemically synthesized
tggagcttctgagacacttc

SEQ ID NO: 60599 - DNA, 20 bp, Artificial Sequence
  chemically synthesized
cttctggagcttctgagaca

SEQ ID NO: 60600 - DNA, 20 bp, Artificial Sequence
  chemically synthesized
gcttctggagcttctgagac

SEQ ID NO: 60601 - DNA, 20 bp, Artificial Sequence
  chemically synthesized
ctcaatggactctttgcttc

SEQ ID NO: 60602 - DNA, 20 bp, Artificial Sequence
  chemically synthesized
ccagcatgttcctcaatgga

SEQ ID NO: 60603 - DNA, 20 bp, Artificial Sequence
  chemically synthesized
tgacagggaatgtcacagaa

SEQ ID NO: 60604 - DNA, 20 bp, Artificial Sequence
  chemically synthesized
ctgacagggaatgtcacaga

SEQ ID NO: 60605 - DNA, 20 bp, Artificial Sequence
  chemically synthesized
tctgacagggaatgtcacag

SEQ ID NO: 60606 - DNA, 20 bp, Artificial Sequence
  chemically synthesized
aggagtaggtctatagagtt

SEQ ID NO: 60607 - DNA, 20 bp, Artificial Sequence
  chemically synthesized
agttcaggagtaggtctata

SEQ ID NO: 60608 - DNA, 20 bp, Artificial Sequence
  chemically synthesized
agatggcaccagagagacac

SEQ ID NO: 60609 - DNA, 20 bp, Artificial Sequence
  chemically synthesized
tgcacagaaaaaggagaaag

SEQ ID NO: 60610 - DNA, 20 bp, Artificial Sequence
  chemically synthesized
aattctgcacagaaaaagga

SEQ ID NO: 60611 - DNA, 20 bp, Artificial Sequence
  chemically synthesized
aaattctgcacagaaaaagg

SEQ ID NO: 60612 - DNA, 20 bp, Artificial Sequence
  chemically synthesized
aaactcacatttaaattctg

SEQ ID NO: 60613 - DNA, 20 bp, Artificial Sequence
  chemically synthesized
aggattgaaactcacattta

SEQ ID NO: 60614 - DNA, 20 bp, Artificial Sequence
  chemically synthesized
caggattgaaactcacattt

SEQ ID NO: 60615 - DNA, 20 bp, Artificial Sequence
  chemically synthesized
aatgtcatccaccctatgaa

SEQ ID NO: 60616 - DNA, 20 bp, Artificial Sequence
  chemically synthesized
atctctagcttgaatgtcat

SEQ ID NO: 60617 - DNA, 20 bp, Artificial Sequence
  chemically synthesized
cacttcatctctagcttgaa

SEQ ID NO: 60618 - DNA, 20 bp, Artificial Sequence
  chemically synthesized
cagaaaaccttccacttcat

SEQ ID NO: 60619 - DNA, 20 bp, Artificial Sequence
  chemically synthesized
ctgaggaaacgtatcttgca

SEQ ID NO: 60620 - DNA, 20 bp, Artificial Sequence
  chemically synthesized
tagttgctgaggaaacgtat

SEQ ID NO: 60621 - DNA, 20 bp, Artificial Sequence
  chemically synthesized
ttctagttgctgaggaaacg

SEQ ID NO: 60622 - DNA, 20 bp, Artificial Sequence
  chemically synthesized
tcagattcttctagttgctg

SEQ ID NO: 60623 - DNA, 20 bp, Artificial Sequence
  chemically synthesized
gggctctgcacatcccctcc

SEQ ID NO: 60624 - DNA, 20 bp, Artificial Sequence
  chemically synthesized
tggagtgatgactacatcct

SEQ ID NO: 60625 - DNA, 20 bp, Artificial Sequence
  chemically synthesized
ctggagtgatgactacatcc

SEQ ID NO: 60626 - DNA, 20 bp, Artificial Sequence
  chemically synthesized
caaagctttctggagtgatg

SEQ ID NO: 60627 - DNA, 20 bp, Artificial Sequence
  chemically synthesized
ccagccaggcatgtgaggga

SEQ ID NO: 60628 - DNA, 20 bp, Artificial Sequence
  chemically synthesized
ccactctccctgcagtctag

SEQ ID NO: 60629 - DNA, 20 bp, Artificial Sequence
  chemically synthesized
ttgccactctccctgcagtc

SEQ ID NO: 60630 - DNA, 20 bp, Artificial Sequence
  chemically synthesized
tagtcccaaggctaagcagg

SEQ ID NO: 60631 - DNA, 20 bp, Artificial Sequence
  chemically synthesized
gtagtcccaaggctaagcag

SEQ ID NO: 60632 - DNA, 20 bp, Artificial Sequence
  chemically synthesized
gagagaaaatggagggggca

SEQ ID NO: 60633 - DNA, 20 bp, Artificial Sequence
  chemically synthesized
cagattggagagaaaatgga

SEQ ID NO: 60634 - DNA, 20 bp, Artificial Sequence
  chemically synthesized
aatgtcaggattccagattg

SEQ ID NO: 60635 - DNA, 20 bp, Artificial Sequence
  chemically synthesized
atcccagggaagtaagaatg

SEQ ID NO: 60636 - DNA, 20 bp, Artificial Sequence
  chemically synthesized
gatcccagggaagtaagaat

SEQ ID NO: 60637 - DNA, 20 bp, Artificial Sequence
  chemically synthesized
atttgatcccagggaagtaa

SEQ ID NO: 60638 - DNA, 20 bp, Artificial Sequence
  chemically synthesized
ttgatttgatcccagggaag

SEQ ID NO: 60639 - DNA, 20 bp, Artificial Sequence
  chemically synthesized
ttcttgatttgatcccaggg

SEQ ID NO: 60640 - DNA, 20 bp, Artificial Sequence
  chemically synthesized
gtagaagctggacatggtga

SEQ ID NO: 60641 - DNA, 20 bp, Artificial Sequence
  chemically synthesized
ggtagaagctggacatggtg

SEQ ID NO: 60642 - DNA, 20 bp, Artificial Sequence
  chemically synthesized
tggtagaagctggacatggt

SEQ ID NO: 60643 - DNA, 20 bp, Artificial Sequence
  chemically synthesized
actggttttggtagaagctg

SEQ ID NO: 60644 - DNA, 20 bp, Artificial Sequence
  chemically synthesized
cacttcactggttttggtag

SEQ ID NO: 60645 - DNA, 20 bp, Artificial Sequence
  chemically synthesized
ttacacttcactggttttgg

SEQ ID NO: 60646 - DNA, 20 bp, Artificial Sequence
  chemically synthesized
cttacacttcactggttttg

SEQ ID NO: 60647 - DNA, 20 bp, Artificial Sequence
  chemically synthesized
agtctgggtttcttacactt

SEQ ID NO: 60648 - DNA, 20 bp, Artificial Sequence
  chemically synthesized
tcgctcacggtaagttcagt

SEQ ID NO: 60649 - DNA, 20 bp, Artificial Sequence
  chemically synthesized
gtcgctcacggtaagttcag

SEQ ID NO: 60650 - DNA, 20 bp, Artificial Sequence
  chemically synthesized
aatcatctttgtcgctcacg

SEQ ID NO: 60651 - DNA, 20 bp, Artificial Sequence
  chemically synthesized
aaatcatctttgtcgctcac

SEQ ID NO: 60652 - DNA, 20 bp, Artificial Sequence
  chemically synthesized
taaatcatctttgtcgctca

SEQ ID NO: 60653 - DNA, 20 bp, Artificial Sequence
  chemically synthesized
ccttttaaatcatctttgtc

SEQ ID NO: 60654 - DNA, 20 bp, Artificial Sequence
  chemically synthesized
tctgtgctgtgagggagact

SEQ ID NO: 60655 - DNA, 20 bp, Artificial Sequence
  chemically synthesized
tcttctctgtgctgtgaggg

SEQ ID NO: 60656 - DNA, 20 bp, Artificial Sequence
  chemically synthesized
gtcttctctgtgctgtgagg

SEQ ID NO: 60657 - DNA, 20 bp, Artificial Sequence
  chemically synthesized
tgtcttctctgtgctgtgag

SEQ ID NO: 60658 - DNA, 20 bp, Artificial Sequence
  chemically synthesized
ctaattttgtcttctctgtg

SEQ ID NO: 60659 - DNA, 20 bp, Artificial Sequence
  chemically synthesized
gctaattttgtcttctctgt

SEQ ID NO: 60660 - DNA, 20 bp, Artificial Sequence
  chemically synthesized
tgctaattttgtcttctctg

SEQ ID NO: 60661 - DNA, 20 bp, Artificial Sequence
  chemically synthesized
cagactgtgtagtggggttt

SEQ ID NO: 60662 - DNA, 20 bp, Artificial Sequence
  chemically synthesized
agaatcttgcagactgtgta

SEQ ID NO: 60663 - DNA, 20 bp, Artificial Sequence
  chemically synthesized
cagaatcttgcagactgtgt

SEQ ID NO: 60664 - DNA, 20 bp, Artificial Sequence
  chemically synthesized
agtgccactgaactcaggaa

SEQ ID NO: 60665 - DNA, 20 bp, Artificial Sequence
  chemically synthesized
actcatgttgagtgccactg

SEQ ID NO: 60666 - DNA, 20 bp, Artificial Sequence
  chemically synthesized
tgaccaaatccacatggtag

SEQ ID NO: 60667 - DNA, 20 bp, Artificial Sequence
  chemically synthesized
aaccttgtgaccaaatccac

SEQ ID NO: 60668 - DNA, 20 bp, Artificial Sequence
  chemically synthesized
ggtcaccttaaaccttgtga

SEQ ID NO: 60669 - DNA, 20 bp, Artificial Sequence
  chemically synthesized
aatagctgaatcattgggtc

SEQ ID NO: 60670 - DNA, 20 bp, Artificial Sequence
  chemically synthesized
aaatagctgaatcattgggt

SEQ ID NO: 60671 - DNA, 20 bp, Artificial Sequence
  chemically synthesized
taaatagctgaatcattggg

SEQ ID NO: 60672 - DNA, 20 bp, Artificial Sequence
  chemically synthesized
ttaaatagctgaatcattgg

SEQ ID NO: 60673 - DNA, 20 bp, Artificial Sequence
  chemically synthesized
tttaaatagctgaatcattg

SEQ ID NO: 60674 - DNA, 20 bp, Artificial Sequence
  chemically synthesized
ttttaaatagctgaatcatt

SEQ ID NO: 60675 - DNA, 20 bp, Artificial Sequence
  chemically synthesized
tttttaaatagctgaatcat

SEQ ID NO: 60676 - DNA, 20 bp, Artificial Sequence
  chemically synthesized
ttttttaaatagctgaatca

SEQ ID NO: 60677 - DNA, 20 bp, Artificial Sequence
  chemically synthesized
tttttttaaatagctgaatc

SEQ ID NO: 60678 - DNA, 20 bp, Artificial Sequence
  chemically synthesized
ctcttttttttttaaatagc

SEQ ID NO: 60679 - DNA, 20 bp, Artificial Sequence
  chemically synthesized
cctcttttttttttaaatag

SEQ ID NO: 60680 - DNA, 20 bp, Artificial Sequence
  chemically synthesized
tttcctcttttttttttaaa

SEQ ID NO: 60681 - DNA, 20 bp, Artificial Sequence
  chemically synthesized
attctttcctcttttttttt

SEQ ID NO: 60682 - DNA, 20 bp, Artificial Sequence
  chemically synthesized
cattctttcctctttttttt

SEQ ID NO: 60683 - DNA, 20 bp, Artificial Sequence
  chemically synthesized
ctctttcattctttcctctt

SEQ ID NO: 60684 - DNA, 20 bp, Artificial Sequence
  chemically synthesized
actctttcattctttcctct

SEQ ID NO: 60685 - DNA, 20 bp, Artificial Sequence
  chemically synthesized
ctttactctttcattctttc

SEQ ID NO: 60686 - DNA, 20 bp, Artificial Sequence
  chemically synthesized
cctttactctttcattcttt

SEQ ID NO: 60687 - DNA, 20 bp, Artificial Sequence
  chemically synthesized
ctcactcctcaatcatttcc

SEQ ID NO: 60688 - DNA, 20 bp, Artificial Sequence
  chemically synthesized
ctgccttcctcactcctcaa

SEQ ID NO: 60689 - DNA, 20 bp, Artificial Sequence
  chemically synthesized
ctctcatgctctcttcctgc

SEQ ID NO: 60690 - DNA, 20 bp, Artificial Sequence
  chemically synthesized
cctctcatgctctcttcctg

SEQ ID NO: 60691 - DNA, 20 bp, Artificial Sequence
  chemically synthesized
tttcctctcatgctctcttc

SEQ ID NO: 60692 - DNA, 20 bp, Artificial Sequence
  chemically synthesized
ctttcctctcatgctctctt

SEQ ID NO: 60693 - DNA, 20 bp, Artificial Sequence
  chemically synthesized
tttctttcctctcatgctct

SEQ ID NO: 60694 - DNA, 20 bp, Artificial Sequence
  chemically synthesized
ctttctttcctctcatgctc

SEQ ID NO: 60695 - DNA, 20 bp, Artificial Sequence
  chemically synthesized
ctttctttctttcctctcat

SEQ ID NO: 60696 - DNA, 20 bp, Artificial Sequence
  chemically synthesized
cctttctttctttcctctca

SEQ ID NO: 60697 - DNA, 20 bp, Artificial Sequence
  chemically synthesized
tcctttctttctttcctctc

SEQ ID NO: 60698 - DNA, 20 bp, Artificial Sequence
  chemically synthesized
ttttcctttctttctttcct

SEQ ID NO: 60699 - DNA, 20 bp, Artificial Sequence
  chemically synthesized
attttcctttctttctttcc

SEQ ID NO: 60700 - DNA, 20 bp, Artificial Sequence
  chemically synthesized
tattttcctttctttctttc

SEQ ID NO: 60701 - DNA, 20 bp, Artificial Sequence
  chemically synthesized
ttattttcctttctttcttt

SEQ ID NO: 60702 - DNA, 20 bp, Artificial Sequence
  chemically synthesized
tttattttcctttctttctt

SEQ ID NO: 60703 - DNA, 20 bp, Artificial Sequence
  chemically synthesized
aatcctaataatggcaacta

SEQ ID NO: 60704 - DNA, 20 bp, Artificial Sequence
  chemically synthesized
caaagcactggatatatatt

SEQ ID NO: 60705 - DNA, 20 bp, Artificial Sequence
  chemically synthesized
tcaggatggagtgagacaag

SEQ ID NO: 60706 - DNA, 20 bp, Artificial Sequence
  chemically synthesized
ttgtcaggatggagtgagac

SEQ ID NO: 60707 - DNA, 20 bp, Artificial Sequence
  chemically synthesized
cacacacctcccaggattat

SEQ ID NO: 60708 - DNA, 20 bp, Artificial Sequence
  chemically synthesized
atgatctataaaaaagagag

SEQ ID NO: 60709 - DNA, 20 bp, Artificial Sequence
  chemically synthesized
aatgatctataaaaaagaga

SEQ ID NO: 60710 - DNA, 20 bp, Artificial Sequence
  chemically synthesized
tgaatttaatgatctataaa

SEQ ID NO: 60711 - DNA, 20 bp, Artificial Sequence
  chemically synthesized
gttctgaatttaatgatcta

SEQ ID NO: 60712 - DNA, 20 bp, Artificial Sequence
  chemically synthesized
actccttagttctgaattta

SEQ ID NO: 60713 - DNA, 20 bp, Artificial Sequence
  chemically synthesized
cttaactccttagttctgaa

SEQ ID NO: 60714 - DNA, 20 bp, Artificial Sequence
  chemically synthesized
gacaagttacttaactcctt

SEQ ID NO: 60715 - DNA, 20 bp, Artificial Sequence
  chemically synthesized
actgtgtgaacaacttggac

SEQ ID NO: 60716 - DNA, 20 bp, Artificial Sequence
  chemically synthesized
gcccctcccttcactgtgtg

SEQ ID NO: 60717 - DNA, 20 bp, Artificial Sequence
  chemically synthesized
gactcccagccatcatatct

SEQ ID NO: 60718 - DNA, 20 bp, Artificial Sequence
  chemically synthesized
gcactcaagaatggggcagt

SEQ ID NO: 60719 - DNA, 20 bp, Artificial Sequence
  chemically synthesized
ggcactcaagaatggggcag

SEQ ID NO: 60720 - DNA, 20 bp, Artificial Sequence
  chemically synthesized
ctagtgacgtttggcactca

SEQ ID NO: 60721 - DNA, 20 bp, Artificial Sequence
  chemically synthesized
tctaggcacaccctgttact

SEQ ID NO: 60722 - DNA, 20 bp, Artificial Sequence
  chemically synthesized
gatcataaattatctaggca

SEQ ID NO: 60723 - DNA, 20 bp, Artificial Sequence
  chemically synthesized
ggatcataaattatctaggc

SEQ ID NO: 60724 - DNA, 20 bp, Artificial Sequence
  chemically synthesized
caaactgactcagtttggat

SEQ ID NO: 60725 - DNA, 20 bp, Artificial Sequence
  chemically synthesized
ccaaactgactcagtttgga

SEQ ID NO: 60726 - DNA, 20 bp, Artificial Sequence
  chemically synthesized
actttccaaactgactcagt

SEQ ID NO: 60727 - DNA, 20 bp, Artificial Sequence
  chemically synthesized
cactttccaaactgactcag

SEQ ID NO: 60728 - DNA, 20 bp, Artificial Sequence
  chemically synthesized
cctttcactttccaaactga

SEQ ID NO: 60729 - DNA, 20 bp, Artificial Sequence
  chemically synthesized
ccctttcactttccaaactg

SEQ ID NO: 60730 - DNA, 20 bp, Artificial Sequence
  chemically synthesized
tatgtaagtttccctttcac

SEQ ID NO: 60731 - DNA, 20 bp, Artificial Sequence
  chemically synthesized
tcccggagggattatatgta

SEQ ID NO: 60732 - DNA, 20 bp, Artificial Sequence
  chemically synthesized
ctcattgtcccggagggatt

SEQ ID NO: 60733 - DNA, 20 bp, Artificial Sequence
  chemically synthesized
gctcattgtcccggagggat

SEQ ID NO: 60734 - DNA, 20 bp, Artificial Sequence
  chemically synthesized
tgctcattgtcccggaggga

SEQ ID NO: 60735 - DNA, 20 bp, Artificial Sequence
  chemically synthesized
ttgctcattgtcccggaggg

SEQ ID NO: 60736 - DNA, 20 bp, Artificial Sequence
  chemically synthesized
tctggggacagtcctagttt

SEQ ID NO: 60737 - DNA, 20 bp, Artificial Sequence
  chemically synthesized
gtctggggacagtcctagtt

SEQ ID NO: 60738 - DNA, 20 bp, Artificial Sequence
  chemically synthesized
acatttgtctggggacagtc

SEQ ID NO: 60739 - DNA, 20 bp, Artificial Sequence
  chemically synthesized
agtgatgatatgtatgttca

SEQ ID NO: 60740 - DNA, 20 bp, Artificial Sequence
  chemically synthesized
aagtgatgatatgtatgttc

SEQ ID NO: 60741 - DNA, 20 bp, Artificial Sequence
  chemically synthesized
atttaagtgatgatatgtat

SEQ ID NO: 60742 - DNA, 20 bp, Artificial Sequence
  chemically synthesized
aatttaagtgatgatatgta

SEQ ID NO: 60743 - DNA, 20 bp, Artificial Sequence
  chemically synthesized
taatttaagtgatgatatgt

SEQ ID NO: 60744 - DNA, 20 bp, Artificial Sequence
  chemically synthesized
tcatagccattttaatttaa

SEQ ID NO: 60745 - DNA, 20 bp, Artificial Sequence
  chemically synthesized
ctcatagccattttaattta

SEQ ID NO: 60746 - DNA, 20 bp, Artificial Sequence
  chemically synthesized
tttctcatagccattttaat

SEQ ID NO: 60747 - DNA, 20 bp, Artificial Sequence
  chemically synthesized
ctttctcatagccattttaa

SEQ ID NO: 60748 - DNA, 20 bp, Artificial Sequence
  chemically synthesized
tccccctctttctttctcat

SEQ ID NO: 60749 - DNA, 20 bp, Artificial Sequence
  chemically synthesized
ctccccctctttctttctca

SEQ ID NO: 60750 - DNA, 20 bp, Artificial Sequence
  chemically synthesized
acacccgcaagactgtttct

SEQ ID NO: 60751 - DNA, 20 bp, Artificial Sequence
  chemically synthesized
acatggctggtcatgggact

SEQ ID NO: 60752 - DNA, 20 bp, Artificial Sequence
  chemically synthesized
gacatggctggtcatgggac

SEQ ID NO: 60753 - DNA, 20 bp, Artificial Sequence
  chemically synthesized
tgacatggctggtcatggga

SEQ ID NO: 60754 - DNA, 20 bp, Artificial Sequence
  chemically synthesized
ttttgacatggctggtcatg

SEQ ID NO: 60755 - DNA, 20 bp, Artificial Sequence
  chemically synthesized
ccttcttttgacatggctgg

SEQ ID NO: 60756 - DNA, 20 bp, Artificial Sequence
  chemically synthesized
accttcttttgacatggctg

SEQ ID NO: 60757 - DNA, 20 bp, Artificial Sequence
  chemically synthesized
tttaccttcttttgacatgg

SEQ ID NO: 60758 - DNA, 20 bp, Artificial Sequence
  chemically synthesized
acttctttaccttcttttga

SEQ ID NO: 60759 - DNA, 20 bp, Artificial Sequence
  chemically synthesized
ttgacttctttaccttcttt

SEQ ID NO: 60760 - DNA, 20 bp, Artificial Sequence
  chemically synthesized
cttgacttctttaccttctt

SEQ ID NO: 60761 - DNA, 20 bp, Artificial Sequence
  chemically synthesized
tcttgacttctttaccttct

SEQ ID NO: 60762 - DNA, 20 bp, Artificial Sequence
  chemically synthesized
ttcttgacttctttaccttc

SEQ ID NO: 60763 - DNA, 20 bp, Artificial Sequence
  chemically synthesized
atggctttttcttgacttct

SEQ ID NO: 60764 - DNA, 20 bp, Artificial Sequence
  chemically synthesized
agaaaaatgaaaccaaatgg

SEQ ID NO: 60765 - DNA, 20 bp, Artificial Sequence
  chemically synthesized
cagaaaaatgaaaccaaatg

SEQ ID NO: 60766 - DNA, 20 bp, Artificial Sequence
  chemically synthesized
tcagaaaaatgaaaccaaat

SEQ ID NO: 60767 - DNA, 20 bp, Artificial Sequence
  chemically synthesized
agcctattttcagaaaaatg

SEQ ID NO: 60768 - DNA, 20 bp, Artificial Sequence
  chemically synthesized
cctcttgagcctattttcag

SEQ ID NO: 60769 - DNA, 20 bp, Artificial Sequence
  chemically synthesized
ttccctcttgagcctatttt

SEQ ID NO: 60770 - DNA, 20 bp, Artificial Sequence
  chemically synthesized
attccctcttgagcctattt

SEQ ID NO: 60771 - DNA, 20 bp, Artificial Sequence
  chemically synthesized
taatttattccctcttgagc

SEQ ID NO: 60772 - DNA, 20 bp, Artificial Sequence
  chemically synthesized
ctaatttattccctcttgag

SEQ ID NO: 60773 - DNA, 20 bp, Artificial Sequence
  chemically synthesized
tgagtttctaatttattccc

SEQ ID NO: 60774 - DNA, 20 bp, Artificial Sequence
  chemically synthesized
gtaacaaacaagagaaattg

SEQ ID NO: 60775 - DNA, 20 bp, Artificial Sequence
  chemically synthesized
ggtggtagcagcaagagaat

SEQ ID NO: 60776 - DNA, 20 bp, Artificial Sequence
  chemically synthesized
ctctgagatcatggacggat

SEQ ID NO: 60777 - DNA, 20 bp, Artificial Sequence
  chemically synthesized
cctctgagatcatggacgga

SEQ ID NO: 60778 - DNA, 20 bp, Artificial Sequence
  chemically synthesized
gggtagtgtctatacacatg

SEQ ID NO: 60779 - DNA, 20 bp, Artificial Sequence
  chemically synthesized
ggttggggtagtgtctatac

SEQ ID NO: 60780 - DNA, 20 bp, Artificial Sequence
  chemically synthesized
aggttggggtagtgtctata

SEQ ID NO: 60781 - DNA, 20 bp, Artificial Sequence
  chemically synthesized
gggatgaatttaggttgggg

SEQ ID NO: 60782 - DNA, 20 bp, Artificial Sequence
  chemically synthesized
agggatgaatttaggttggg

SEQ ID NO: 60783 - DNA, 20 bp, Artificial Sequence
  chemically synthesized
ggacaatttagggatgaatt

SEQ ID NO: 60784 - DNA, 20 bp, Artificial Sequence
  chemically synthesized
ctggagaacttgggacaatt

SEQ ID NO: 60785 - DNA, 20 bp, Artificial Sequence
  chemically synthesized
tggcagcctctattgctgga

SEQ ID NO: 60786 - DNA, 20 bp, Artificial Sequence
  chemically synthesized
gtggcagcctctattgctgg

SEQ ID NO: 60787 - DNA, 20 bp, Artificial Sequence
  chemically synthesized
tccctgaagtttgtggcagc

SEQ ID NO: 60788 - DNA, 20 bp, Artificial Sequence
  chemically synthesized
ctccctgaagtttgtggcag

SEQ ID NO: 60789 - DNA, 20 bp, Artificial Sequence
  chemically synthesized
taactctttctccctgaagt

SEQ ID NO: 60790 - DNA, 20 bp, Artificial Sequence
  chemically synthesized
catgtacttgtaactctttc

SEQ ID NO: 60791 - DNA, 20 bp, Artificial Sequence
  chemically synthesized
actcattgcatgtacttgta

SEQ ID NO: 60792 - DNA, 20 bp, Artificial Sequence
  chemically synthesized
tagccacagtcagttcactc

SEQ ID NO: 60793 - DNA, 20 bp, Artificial Sequence
  chemically synthesized
aagattgtagccacagtcag

SEQ ID NO: 60794 - DNA, 20 bp, Artificial Sequence
  chemically synthesized
cgtatatcttcaagattgta

SEQ ID NO: 60795 - DNA, 20 bp, Artificial Sequence
  chemically synthesized
ataatacgtctcttccgtat

SEQ ID NO: 60796 - DNA, 20 bp, Artificial Sequence
  chemically synthesized
gaagtcagtctagaccaaga

SEQ ID NO: 60797 - DNA, 20 bp, Artificial Sequence
  chemically synthesized
gtcattagaagtcagtctag

SEQ ID NO: 60798 - DNA, 20 bp, Artificial Sequence
  chemically synthesized
agttagtcattagaagtcag

SEQ ID NO: 60799 - DNA, 20 bp, Artificial Sequence
  chemically synthesized
gagttagtcattagaagtca

SEQ ID NO: 60800 - DNA, 20 bp, Artificial Sequence
  chemically synthesized
actttgagttagtcattaga

SEQ ID NO: 60801 - DNA, 20 bp, Artificial Sequence
  chemically synthesized
ccttgactttgagttagtca

SEQ ID NO: 60802 - DNA, 20 bp, Artificial Sequence
  chemically synthesized
ctcagttgccttgactttga

SEQ ID NO: 60803 - DNA, 20 bp, Artificial Sequence
  chemically synthesized
ctgagctgacattactcagt

SEQ ID NO: 60804 - DNA, 20 bp, Artificial Sequence
  chemically synthesized
gctgagctgacattactcag

SEQ ID NO: 60805 - DNA, 20 bp, Artificial Sequence
  chemically synthesized
ctgcactttgctgagctgac

SEQ ID NO: 60806 - DNA, 20 bp, Artificial Sequence
  chemically synthesized
gctgcactttgctgagctga

SEQ ID NO: 60807 - DNA, 20 bp, Artificial Sequence
  chemically synthesized
gaggcctgtgggagatgggt

SEQ ID NO: 60808 - DNA, 20 bp, Artificial Sequence
  chemically synthesized
ggaggcctgtgggagatggg

SEQ ID NO: 60809 - DNA, 20 bp, Artificial Sequence
  chemically synthesized
tgtgaacagccagggtttgg

SEQ ID NO: 60810 - DNA, 20 bp, Artificial Sequence
  chemically synthesized
tggttctgtgaacagccagg

SEQ ID NO: 60811 - DNA, 20 bp, Artificial Sequence
  chemically synthesized
gtggttctgtgaacagccag

SEQ ID NO: 60812 - DNA, 20 bp, Artificial Sequence
  chemically synthesized
tgtgcagcatctgccctttg

SEQ ID NO: 60813 - DNA, 20 bp, Artificial Sequence
  chemically synthesized
ctgtgcagcatctgcccttt

SEQ ID NO: 60814 - DNA, 20 bp, Artificial Sequence
  chemically synthesized
tctgtgcagcatctgccctt

SEQ ID NO: 60815 - DNA, 20 bp, Artificial Sequence
  chemically synthesized
tctagttttctgtgcagcat

SEQ ID NO: 60816 - DNA, 20 bp, Artificial Sequence
  chemically synthesized
aaaacagaaaaacagtagca

SEQ ID NO: 60817 - DNA, 20 bp, Artificial Sequence
  chemically synthesized
acagacaacacaaaacaaaa

SEQ ID NO: 60818 - DNA, 20 bp, Artificial Sequence
  chemically synthesized
aaaccccattcacagacaac

SEQ ID NO: 60819 - DNA, 20 bp, Artificial Sequence
  chemically synthesized
atccacagttaaaaccccat

SEQ ID NO: 60820 - DNA, 20 bp, Artificial Sequence
  chemically synthesized
agccaacagataaggtccat

SEQ ID NO: 60821 - DNA, 20 bp, Artificial Sequence
  chemically synthesized
aagccaacagataaggtcca

SEQ ID NO: 60822 - DNA, 20 bp, Artificial Sequence
  chemically synthesized
ccagtcctttaagccaacag

SEQ ID NO: 60823 - DNA, 20 bp, Artificial Sequence
  chemically synthesized
acctgaagaataagatggtc

SEQ ID NO: 60824 - DNA, 20 bp, Artificial Sequence
  chemically synthesized
gaaagtaaaacattcacctg

SEQ ID NO: 60825 - DNA, 20 bp, Artificial Sequence
  chemically synthesized
ggaaagtaaaacattcacct

SEQ ID NO: 60826 - DNA, 20 bp, Artificial Sequence
  chemically synthesized
ctgctggtgcagaggagagc

SEQ ID NO: 60827 - DNA, 20 bp, Artificial Sequence
  chemically synthesized
ttactgctggtgcagaggag

SEQ ID NO: 60828 - DNA, 20 bp, Artificial Sequence
  chemically synthesized
attactgctggtgcagagga

SEQ ID NO: 60829 - DNA, 20 bp, Artificial Sequence
  chemically synthesized
tatttattactgctggtgca

SEQ ID NO: 60830 - DNA, 20 bp, Artificial Sequence
  chemically synthesized
tggcattgtatttattactg

SEQ ID NO: 60831 - DNA, 20 bp, Artificial Sequence
  chemically synthesized
caaaagcactaggcaaacct

SEQ ID NO: 60832 - DNA, 20 bp, Artificial Sequence
  chemically synthesized
aaaattgcaaaagcactagg

SEQ ID NO: 60833 - DNA, 20 bp, Artificial Sequence
  chemically synthesized
gaaaattgcaaaagcactag

SEQ ID NO: 60834 - DNA, 20 bp, Artificial Sequence
  chemically synthesized
tggaagtgctttgaaaattg

SEQ ID NO: 60835 - DNA, 20 bp, Artificial Sequence
  chemically synthesized
cataaatgcctatcaaggag

SEQ ID NO: 60836 - DNA, 20 bp, Artificial Sequence
  chemically synthesized
ccataaatgcctatcaagga

SEQ ID NO: 60837 - DNA, 20 bp, Artificial Sequence
  chemically synthesized
acatgtagcaggctttccat

SEQ ID NO: 60838 - DNA, 20 bp, Artificial Sequence
  chemically synthesized
ggtcccctgtgcctaacagt

SEQ ID NO: 60839 - DNA, 20 bp, Artificial Sequence
  chemically synthesized
aggtcccctgtgcctaacag

SEQ ID NO: 60840 - DNA, 20 bp, Artificial Sequence
  chemically synthesized
tgtgtctttaggtcccctgt

SEQ ID NO: 60841 - DNA, 20 bp, Artificial Sequence
  chemically synthesized
atgtgtctttaggtcccctg

SEQ ID NO: 60842 - DNA, 20 bp, Artificial Sequence
  chemically synthesized
tatgtgtctttaggtcccct

SEQ ID NO: 60843 - DNA, 20 bp, Artificial Sequence
  chemically synthesized
tgaggcagaatgccatcctt

SEQ ID NO: 60844 - DNA, 20 bp, Artificial Sequence
  chemically synthesized
atgaggcagaatgccatcct

SEQ ID NO: 60845 - DNA, 20 bp, Artificial Sequence
  chemically synthesized
caatttatgaggcagaatgc

SEQ ID NO: 60846 - DNA, 20 bp, Artificial Sequence
  chemically synthesized
gcaatttatgaggcagaatg

SEQ ID NO: 60847 - DNA, 20 bp, Artificial Sequence
  chemically synthesized
tgcaatttatgaggcagaat

SEQ ID NO: 60848 - DNA, 20 bp, Artificial Sequence
  chemically synthesized
ggttttgcaatttatgaggc

SEQ ID NO: 60849 - DNA, 20 bp, Artificial Sequence
  chemically synthesized
attaggttttgcaatttatg

SEQ ID NO: 60850 - DNA, 20 bp, Artificial Sequence
  chemically synthesized
cattaggttttgcaatttat

SEQ ID NO: 60851 - DNA, 20 bp, Artificial Sequence
  chemically synthesized
ccaagcagtcactttcatta

SEQ ID NO: 60852 - DNA, 20 bp, Artificial Sequence
  chemically synthesized
accaagcagtcactttcatt

SEQ ID NO: 60853 - DNA, 20 bp, Artificial Sequence
  chemically synthesized
tttaccaagcagtcactttc

SEQ ID NO: 60854 - DNA, 20 bp, Artificial Sequence
  chemically synthesized
gtttaccaagcagtcacttt

SEQ ID NO: 60855 - DNA, 20 bp, Artificial Sequence
  chemically synthesized
taatataataataatttgtt

SEQ ID NO: 60856 - DNA, 20 bp, Artificial Sequence
  chemically synthesized
ataatataataataatttgt

SEQ ID NO: 60857 - DNA, 20 bp, Artificial Sequence
  chemically synthesized
tataatataataataatttg

SEQ ID NO: 60858 - DNA, 20 bp, Artificial Sequence
  chemically synthesized
tagcattttataatataata

SEQ ID NO: 60859 - DNA, 20 bp, Artificial Sequence
  chemically synthesized
atagcattttataatataat

SEQ ID NO: 60860 - DNA, 20 bp, Artificial Sequence
  chemically synthesized
tatagcattttataatataa

SEQ ID NO: 60861 - DNA, 20 bp, Artificial Sequence
  chemically synthesized
aatatggctcttttatagca

SEQ ID NO: 60862 - DNA, 20 bp, Artificial Sequence
  chemically synthesized
caatatggctcttttatagc

SEQ ID NO: 60863 - DNA, 20 bp, Artificial Sequence
  chemically synthesized
ccctgtctccaacagggcac

SEQ ID NO: 60864 - DNA, 20 bp, Artificial Sequence
  chemically synthesized
gccctgtctccaacagggca

SEQ ID NO: 60865 - DNA, 20 bp, Artificial Sequence
  chemically synthesized
tggcatttgccctgtctcca

SEQ ID NO: 60866 - DNA, 20 bp, Artificial Sequence
  chemically synthesized
gtggcatttgccctgtctcc

SEQ ID NO: 60867 - DNA, 20 bp, Artificial Sequence
  chemically synthesized
tgtggcatttgccctgtctc

SEQ ID NO: 60868 - DNA, 20 bp, Artificial Sequence
  chemically synthesized
ttgtggcatttgccctgtct

SEQ ID NO: 60869 - DNA, 20 bp, Artificial Sequence
  chemically synthesized
catcatttttgtggcatttg

SEQ ID NO: 60870 - DNA, 20 bp, Artificial Sequence
  chemically synthesized
acatcatttttgtggcattt

SEQ ID NO: 60871 - DNA, 20 bp, Artificial Sequence
  chemically synthesized
ctccatgtaaatttacatca

SEQ ID NO: 60872 - DNA, 20 bp, Artificial Sequence
  chemically synthesized
cctccatgtaaatttacatc

SEQ ID NO: 60873 - DNA, 20 bp, Artificial Sequence
  chemically synthesized
tcctccatgtaaatttacat

SEQ ID NO: 60874 - DNA, 20 bp, Artificial Sequence
  chemically synthesized
tacttttcctccatgtaaat

SEQ ID NO: 60875 - DNA, 20 bp, Artificial Sequence
  chemically synthesized
tgctgcctacaaaccaggca

SEQ ID NO: 60876 - DNA, 20 bp, Artificial Sequence
  chemically synthesized
tacaaaaggtaaagaacacc

SEQ ID NO: 60877 - DNA, 20 bp, Artificial Sequence
  chemically synthesized
ctacaaaaggtaaagaacac

SEQ ID NO: 60878 - DNA, 20 bp, Artificial Sequence
  chemically synthesized
actcccatttctacaaaagg

SEQ ID NO: 60879 - DNA, 20 bp, Artificial Sequence
  chemically synthesized
agacttgactcccatttcta

SEQ ID NO: 60880 - DNA, 20 bp, Artificial Sequence
  chemically synthesized
gagacttgactcccatttct

SEQ ID NO: 60881 - DNA, 20 bp, Artificial Sequence
  chemically synthesized
tggagcctcctatttgagac

SEQ ID NO: 60882 - DNA, 20 bp, Artificial Sequence
  chemically synthesized
gtggagcctcctatttgaga

SEQ ID NO: 60883 - DNA, 20 bp, Artificial Sequence
  chemically synthesized
tgtggagcctcctatttgag

SEQ ID NO: 60884 - DNA, 20 bp, Artificial Sequence
  chemically synthesized
tgtgaataaggtatcagaga

SEQ ID NO: 60885 - DNA, 20 bp, Artificial Sequence
  chemically synthesized
aaagaacttctgtgaataag

SEQ ID NO: 60886 - DNA, 20 bp, Artificial Sequence
  chemically synthesized
ccataagtcaaagaaaataa

SEQ ID NO: 60887 - DNA, 20 bp, Artificial Sequence
  chemically synthesized
cccataagtcaaagaaaata

SEQ ID NO: 60888 - DNA, 20 bp, Artificial Sequence
  chemically synthesized
tcccataagtcaaagaaaat

SEQ ID NO: 60889 - DNA, 20 bp, Artificial Sequence
  chemically synthesized
ctgtgtcccagttttcccat

SEQ ID NO: 60890 - DNA, 20 bp, Artificial Sequence
  chemically synthesized
cctgtcttcctgtgtcccag

SEQ ID NO: 60891 - DNA, 20 bp, Artificial Sequence
  chemically synthesized
acctgtcttcctgtgtccca

SEQ ID NO: 60892 - DNA, 20 bp, Artificial Sequence
  chemically synthesized
ggtaatttacctgtcttcct

SEQ ID NO: 60893 - DNA, 20 bp, Artificial Sequence
  chemically synthesized
acgtgtgaggttgggtaatt

SEQ ID NO: 60894 - DNA, 20 bp, Artificial Sequence
  chemically synthesized
tgacttaacgtgtgaggttg

SEQ ID NO: 60895 - DNA, 20 bp, Artificial Sequence
  chemically synthesized
tggctcccagttctgactta

SEQ ID NO: 60896 - DNA, 20 bp, Artificial Sequence
  chemically synthesized
taccagggatacaaaattat

SEQ ID NO: 60897 - DNA, 20 bp, Artificial Sequence
  chemically synthesized
ataccagggatacaaaatta

SEQ ID NO: 60898 - DNA, 20 bp, Artificial Sequence
  chemically synthesized
tctatttataccagggatac

SEQ ID NO: 60899 - DNA, 20 bp, Artificial Sequence
  chemically synthesized
aagagattgtctatttatac

SEQ ID NO: 60900 - DNA, 20 bp, Artificial Sequence
  chemically synthesized
ttcaagagattgtctattta

SEQ ID NO: 60901 - DNA, 20 bp, Artificial Sequence
  chemically synthesized
cttcaagagattgtctattt

SEQ ID NO: 60902 - DNA, 20 bp, Artificial Sequence
  chemically synthesized
atttcttcaagagattgtct

SEQ ID NO: 60903 - DNA, 20 bp, Artificial Sequence
  chemically synthesized
tatggtcatctcttcatttc

SEQ ID NO: 60904 - DNA, 20 bp, Artificial Sequence
  chemically synthesized
ctatggtcatctcttcattt

SEQ ID NO: 60905 - DNA, 20 bp, Artificial Sequence
  chemically synthesized
tctatggtcatctcttcatt

SEQ ID NO: 60906 - DNA, 20 bp, Artificial Sequence
  chemically synthesized
ttctatggtcatctcttcat

SEQ ID NO: 60907 - DNA, 20 bp, Artificial Sequence
  chemically synthesized
gagctggagatatctcgatg

SEQ ID NO: 60908 - DNA, 20 bp, Artificial Sequence
  chemically synthesized
agagctggagatatctcgat

SEQ ID NO: 60909 - DNA, 20 bp, Artificial Sequence
  chemically synthesized
tagagctggagatatctcga

SEQ ID NO: 60910 - DNA, 20 bp, Artificial Sequence
  chemically synthesized
aaacaaaggattttagagct

SEQ ID NO: 60911 - DNA, 20 bp, Artificial Sequence
  chemically synthesized
caaagataacatatgccaaa

SEQ ID NO: 60912 - DNA, 20 bp, Artificial Sequence
  chemically synthesized
aatactacagtaacagacag

SEQ ID NO: 60913 - DNA, 20 bp, Artificial Sequence
  chemically synthesized
aaatactacagtaacagaca

SEQ ID NO: 60914 - DNA, 20 bp, Artificial Sequence
  chemically synthesized
taaatactacagtaacagac

SEQ ID NO: 60915 - DNA, 20 bp, Artificial Sequence
  chemically synthesized
taatacatgcattttaaata

SEQ ID NO: 60916 - DNA, 20 bp, Artificial Sequence
  chemically synthesized
tatgattataatacatgcat

SEQ ID NO: 60917 - DNA, 20 bp, Artificial Sequence
  chemically synthesized
tgattatatgattataatac

SEQ ID NO: 60918 - DNA, 20 bp, Artificial Sequence
  chemically synthesized
acagcagttatgattatatg

SEQ ID NO: 60919 - DNA, 20 bp, Artificial Sequence
  chemically synthesized
tccctaggtatataatcaag

SEQ ID NO: 60920 - DNA, 20 bp, Artificial Sequence
  chemically synthesized
cacattgtccctaggtatat

SEQ ID NO: 60921 - DNA, 20 bp, Artificial Sequence
  chemically synthesized
cattacacattgtccctagg

SEQ ID NO: 60922 - DNA, 20 bp, Artificial Sequence
  chemically synthesized
gtaatcttacattacacatt

SEQ ID NO: 60923 - DNA, 20 bp, Artificial Sequence
  chemically synthesized
ggcagaaccaattagtaatc

SEQ ID NO: 60924 - DNA, 20 bp, Artificial Sequence
  chemically synthesized
ctaataaaatctgaaaggag

SEQ ID NO: 60925 - DNA, 20 bp, Artificial Sequence
  chemically synthesized
cctaataaaatctgaaagga

SEQ ID NO: 60926 - DNA, 20 bp, Artificial Sequence
  chemically synthesized
tcctaataaaatctgaaagg

SEQ ID NO: 60927 - DNA, 20 bp, Artificial Sequence
  chemically synthesized
ttcctaataaaatctgaaag

SEQ ID NO: 60928 - DNA, 20 bp, Artificial Sequence
  chemically synthesized
tttcctaataaaatctgaaa

SEQ ID NO: 60929 - DNA, 20 bp, Artificial Sequence
  chemically synthesized
ttttcctaataaaatctgaa

SEQ ID NO: 60930 - DNA, 20 bp, Artificial Sequence
  chemically synthesized
tttttcctaataaaatctga

SEQ ID NO: 60931 - DNA, 20 bp, Artificial Sequence
  chemically synthesized
ttttttcctaataaaatctg

SEQ ID NO: 60932 - DNA, 20 bp, Artificial Sequence
  chemically synthesized
tttttttttcctaataaaat

SEQ ID NO: 60933 - DNA, 20 bp, Artificial Sequence
  chemically synthesized
atttttttttcctaataaaa

SEQ ID NO: 60934 - DNA, 20 bp, Artificial Sequence
  chemically synthesized
tctccgatcaggaggtttat

SEQ ID NO: 60935 - DNA, 20 bp, Artificial Sequence
  chemically synthesized
atacattgtctccgatcagg

SEQ ID NO: 60936 - DNA, 20 bp, Artificial Sequence
  chemically synthesized
tgattaatacattgtctccg

SEQ ID NO: 60937 - DNA, 20 bp, Artificial Sequence
  chemically synthesized
cacttctgattaatacattg

SEQ ID NO: 60938 - DNA, 20 bp, Artificial Sequence
  chemically synthesized
acacttctgattaatacatt

SEQ ID NO: 60939 - DNA, 20 bp, Artificial Sequence
  chemically synthesized
atgctatatagaactggcag

SEQ ID NO: 60940 - DNA, 20 bp, Artificial Sequence
  chemically synthesized
catgctatatagaactggca

SEQ ID NO: 60941 - DNA, 20 bp, Artificial Sequence
  chemically synthesized
atttcatgctatatagaact

SEQ ID NO: 60942 - DNA, 20 bp, Artificial Sequence
  chemically synthesized
catttcatgctatatagaac

SEQ ID NO: 60943 - DNA, 20 bp, Artificial Sequence
  chemically synthesized
tcatttcatgctatatagaa

SEQ ID NO: 60944 - DNA, 20 bp, Artificial Sequence
  chemically synthesized
gctgtcttttcatttcatgc

SEQ ID NO: 60945 - DNA, 20 bp, Artificial Sequence
  chemically synthesized
gaccaaattagctgtctttt

SEQ ID NO: 60946 - DNA, 20 bp, Artificial Sequence
  chemically synthesized
ttggaccaaattagctgtct

SEQ ID NO: 60947 - DNA, 20 bp, Artificial Sequence
  chemically synthesized
gttggaccaaattagctgtc

SEQ ID NO: 60948 - DNA, 20 bp, Artificial Sequence
  chemically synthesized
aaggaagaggcaaaggctgg

SEQ ID NO: 60949 - DNA, 20 bp, Artificial Sequence
  chemically synthesized
ccatggaaaccacattgaag

SEQ ID NO: 60950 - DNA, 20 bp, Artificial Sequence
  chemically synthesized
tgaagcaaattcccatggaa

SEQ ID NO: 60951 - DNA, 20 bp, Artificial Sequence
  chemically synthesized
ctgaagcaaattcccatgga

SEQ ID NO: 60952 - DNA, 20 bp, Artificial Sequence
  chemically synthesized
tctgaagcaaattcccatgg

SEQ ID NO: 60953 - DNA, 20 bp, Artificial Sequence
  chemically synthesized
gcttttctgaagcaaattcc

SEQ ID NO: 60954 - DNA, 20 bp, Artificial Sequence
  chemically synthesized
gcccctctagaagagctaag

SEQ ID NO: 60955 - DNA, 20 bp, Artificial Sequence
  chemically synthesized
ctggcccgtaccaagtctct

SEQ ID NO: 60956 - DNA, 20 bp, Artificial Sequence
  chemically synthesized
ttcctggcccgtaccaagtc

SEQ ID NO: 60957 - DNA, 20 bp, Artificial Sequence
  chemically synthesized
caggagctctgccacatatt

SEQ ID NO: 60958 - DNA, 20 bp, Artificial Sequence
  chemically synthesized
ccaggagctctgccacatat

SEQ ID NO: 60959 - DNA, 20 bp, Artificial Sequence
  chemically synthesized
aagaatagtcccaacaataa

SEQ ID NO: 60960 - DNA, 20 bp, Artificial Sequence
  chemically synthesized
aaagaatagtcccaacaata

SEQ ID NO: 60961 - DNA, 20 bp, Artificial Sequence
  chemically synthesized
taaagaatagtcccaacaat

SEQ ID NO: 60962 - DNA, 20 bp, Artificial Sequence
  chemically synthesized
actgtagtgaacaatggata

SEQ ID NO: 60963 - DNA, 20 bp, Artificial Sequence
  chemically synthesized
aatcagagatcttcactgta

SEQ ID NO: 60964 - DNA, 20 bp, Artificial Sequence
  chemically synthesized
taatgcatgtggatagtaca

SEQ ID NO: 60965 - DNA, 20 bp, Artificial Sequence
  chemically synthesized
gtaatgcatgtggatagtac

SEQ ID NO: 60966 - DNA, 20 bp, Artificial Sequence
  chemically synthesized
tatactaagcagctctgcga

SEQ ID NO: 60967 - DNA, 20 bp, Artificial Sequence
  chemically synthesized
tacgcttatatactaagcag

SEQ ID NO: 60968 - DNA, 20 bp, Artificial Sequence
  chemically synthesized
catacattgtacgcttatat

SEQ ID NO: 60969 - DNA, 20 bp, Artificial Sequence
  chemically synthesized
ttacatacattgtacgctta

SEQ ID NO: 60970 - DNA, 20 bp, Artificial Sequence
  chemically synthesized
aatatgagatggttattaca

SEQ ID NO: 60971 - DNA, 20 bp, Artificial Sequence
  chemically synthesized
attaaatatgagatggttat

SEQ ID NO: 60972 - DNA, 20 bp, Artificial Sequence
  chemically synthesized
aattaaatatgagatggtta

SEQ ID NO: 60973 - DNA, 20 bp, Artificial Sequence
  chemically synthesized
tataccatttaattaaatat

SEQ ID NO: 60974 - DNA, 20 bp, Artificial Sequence
  chemically synthesized
ttctataccatttaattaaa

SEQ ID NO: 60975 - DNA, 20 bp, Artificial Sequence
  chemically synthesized
attaaatggtatagaagaac

SEQ ID NO: 60976 - DNA, 20 bp, Artificial Sequence
  chemically synthesized
aattaaatggtatagaagaa

SEQ ID NO: 60977 - DNA, 20 bp, Artificial Sequence
  chemically synthesized
gtatataagcgtacaatgta

SEQ ID NO: 60978 - DNA, 20 bp, Artificial Sequence
  chemically synthesized
gcagagctgcttagtatata

SEQ ID NO: 60979 - DNA, 20 bp, Artificial Sequence
  chemically synthesized
cgcagagctgcttagtatat

SEQ ID NO: 60980 - DNA, 20 bp, Artificial Sequence
  chemically synthesized
caaacatttcgcagagctgc

SEQ ID NO: 60981 - DNA, 20 bp, Artificial Sequence
  chemically synthesized
accgtgtactatccacatgc

SEQ ID NO: 60982 - DNA, 20 bp, Artificial Sequence
  chemically synthesized
aaccgtgtactatccacatg

SEQ ID NO: 60983 - DNA, 20 bp, Artificial Sequence
  chemically synthesized
actacagtgaagatctctga

SEQ ID NO: 60984 - DNA, 20 bp, Artificial Sequence
  chemically synthesized
ttcactacagtgaagatctc

SEQ ID NO: 60985 - DNA, 20 bp, Artificial Sequence
  chemically synthesized
aaatatccattgttcactac

SEQ ID NO: 60986 - DNA, 20 bp, Artificial Sequence
  chemically synthesized
aaaatatccattgttcacta

SEQ ID NO: 60987 - DNA, 20 bp, Artificial Sequence
  chemically synthesized
tttaaaatatccattgttca

SEQ ID NO: 60988 - DNA, 20 bp, Artificial Sequence
  chemically synthesized
ggactattctttaaaatatc

SEQ ID NO: 60989 - DNA, 20 bp, Artificial Sequence
  chemically synthesized
ttgggactattctttaaaat

SEQ ID NO: 60990 - DNA, 20 bp, Artificial Sequence
  chemically synthesized
ttgttgggactattctttaa

SEQ ID NO: 60991 - DNA, 20 bp, Artificial Sequence
  chemically synthesized
attgttgggactattcttta

SEQ ID NO: 60992 - DNA, 20 bp, Artificial Sequence
  chemically synthesized
tcagctctgtggtttattgt

SEQ ID NO: 60993 - DNA, 20 bp, Artificial Sequence
  chemically synthesized
gtcagctctgtggtttattg

SEQ ID NO: 60994 - DNA, 20 bp, Artificial Sequence
  chemically synthesized
tgtcagctctgtggtttatt

SEQ ID NO: 60995 - DNA, 20 bp, Artificial Sequence
  chemically synthesized
ttgtcagctctgtggtttat

SEQ ID NO: 60996 - DNA, 20 bp, Artificial Sequence
  chemically synthesized
ggtggcatttttgtcagctc

SEQ ID NO: 60997 - DNA, 20 bp, Artificial Sequence
  chemically synthesized
gtacgggccaggaagaatat

SEQ ID NO: 60998 - DNA, 20 bp, Artificial Sequence
  chemically synthesized
tagaggggctaagagacttg

SEQ ID NO: 60999 - DNA, 20 bp, Artificial Sequence
  chemically synthesized
gctcttctagaggggctaag

SEQ ID NO: 61000 - DNA, 20 bp, Artificial Sequence
  chemically synthesized
ttagctcttctagaggggct

SEQ ID NO: 61001 - DNA, 20 bp, Artificial Sequence
  chemically synthesized
cttagctcttctagaggggc

SEQ ID NO: 61002 - DNA, 20 bp, Artificial Sequence
  chemically synthesized
tcttagctcttctagagggg

SEQ ID NO: 61003 - DNA, 20 bp, Artificial Sequence
  chemically synthesized
agaggtgcacacctgcattt

SEQ ID NO: 61004 - DNA, 20 bp, Artificial Sequence
  chemically synthesized
agaaaagccaagtatgggct

SEQ ID NO: 61005 - DNA, 20 bp, Artificial Sequence
  chemically synthesized
cttcagaaaagccaagtatg

SEQ ID NO: 61006 - DNA, 20 bp, Artificial Sequence
  chemically synthesized
gcttcagaaaagccaagtat

SEQ ID NO: 61007 - DNA, 20 bp, Artificial Sequence
  chemically synthesized
catgggaatttgcttcagaa

SEQ ID NO: 61008 - DNA, 20 bp, Artificial Sequence
  chemically synthesized
ccatgggaatttgcttcaga

SEQ ID NO: 61009 - DNA, 20 bp, Artificial Sequence
  chemically synthesized
aatgtggtttccatgggaat

SEQ ID NO: 61010 - DNA, 20 bp, Artificial Sequence
  chemically synthesized
cttcaatgtggtttccatgg

SEQ ID NO: 61011 - DNA, 20 bp, Artificial Sequence
  chemically synthesized
cctcttccttcaatgtggtt

SEQ ID NO: 61012 - DNA, 20 bp, Artificial Sequence
  chemically synthesized
gcctcttccttcaatgtggt

SEQ ID NO: 61013 - DNA, 20 bp, Artificial Sequence
  chemically synthesized
ctaccagcctttgcctcttc

SEQ ID NO: 61014 - DNA, 20 bp, Artificial Sequence
  chemically synthesized
cctaccagcctttgcctctt

SEQ ID NO: 61015 - DNA, 20 bp, Artificial Sequence
  chemically synthesized
agctgatttcctaccagcct

SEQ ID NO: 61016 - DNA, 20 bp, Artificial Sequence
  chemically synthesized
gtccaacaaacatgactggg

SEQ ID NO: 61017 - DNA, 20 bp, Artificial Sequence
  chemically synthesized
ggtccaacaaacatgactgg

SEQ ID NO: 61018 - DNA, 20 bp, Artificial Sequence
  chemically synthesized
tatatagcatgaaatgaaaa

SEQ ID NO: 61019 - DNA, 20 bp, Artificial Sequence
  chemically synthesized
atcagaagtgtaaactgcca

SEQ ID NO: 61020 - DNA, 20 bp, Artificial Sequence
  chemically synthesized
ggaaaaaaaaataaacctcc

SEQ ID NO: 61021 - DNA, 20 bp, Artificial Sequence
  chemically synthesized
ttaggaaaaaaaaataaacc

SEQ ID NO: 61022 - DNA, 20 bp, Artificial Sequence
  chemically synthesized
attaggaaaaaaaaataaac

SEQ ID NO: 61023 - DNA, 20 bp, Artificial Sequence
  chemically synthesized
tattaggaaaaaaaaataaa

SEQ ID NO: 61024 - DNA, 20 bp, Artificial Sequence
  chemically synthesized
agattttattaggaaaaaaa

SEQ ID NO: 61025 - DNA, 20 bp, Artificial Sequence
  chemically synthesized
cagattttattaggaaaaaa

SEQ ID NO: 61026 - DNA, 20 bp, Artificial Sequence
  chemically synthesized
tgcccaatctcctttcagat

SEQ ID NO: 61027 - DNA, 20 bp, Artificial Sequence
  chemically synthesized
gttctgcccaatctcctttc

SEQ ID NO: 61028 - DNA, 20 bp, Artificial Sequence
  chemically synthesized
ctaattggttctgcccaatc

SEQ ID NO: 61029 - DNA, 20 bp, Artificial Sequence
  chemically synthesized
tatacctagggacaatgtgt

SEQ ID NO: 61030 - DNA, 20 bp, Artificial Sequence
  chemically synthesized
attatatacctagggacaat

SEQ ID NO: 61031 - DNA, 20 bp, Artificial Sequence
  chemically synthesized
ttgattatatacctagggac

SEQ ID NO: 61032 - DNA, 20 bp, Artificial Sequence
  chemically synthesized
attcttgattatatacctag

SEQ ID NO: 61033 - DNA, 20 bp, Artificial Sequence
  chemically synthesized
taatcatataatcataactg

SEQ ID NO: 61034 - DNA, 20 bp, Artificial Sequence
  chemically synthesized
aaatgcatgtattataatca

SEQ ID NO: 61035 - DNA, 20 bp, Artificial Sequence
  chemically synthesized
aaaatgcatgtattataatc

SEQ ID NO: 61036 - DNA, 20 bp, Artificial Sequence
  chemically synthesized
ctgtagtatttaaaatgcat

SEQ ID NO: 61037 - DNA, 20 bp, Artificial Sequence
  chemically synthesized
gtgtctgagcctctgtctgt

SEQ ID NO: 61038 - DNA, 20 bp, Artificial Sequence
  chemically synthesized
agtgtctgagcctctgtctg

SEQ ID NO: 61039 - DNA, 20 bp, Artificial Sequence
  chemically synthesized
gaatttagtgtctgagcctc

SEQ ID NO: 61040 - DNA, 20 bp, Artificial Sequence
  chemically synthesized
ggaatttagtgtctgagcct

SEQ ID NO: 61041 - DNA, 20 bp, Artificial Sequence
  chemically synthesized
tctttggaatttagtgtctg

SEQ ID NO: 61042 - DNA, 20 bp, Artificial Sequence
  chemically synthesized
gcatatgttatctttggaat

SEQ ID NO: 61043 - DNA, 20 bp, Artificial Sequence
  chemically synthesized
ggcatatgttatctttggaa

SEQ ID NO: 61044 - DNA, 20 bp, Artificial Sequence
  chemically synthesized
tttggcatatgttatctttg

SEQ ID NO: 61045 - DNA, 20 bp, Artificial Sequence
  chemically synthesized
aatgttgtttggcatatgtt

SEQ ID NO: 61046 - DNA, 20 bp, Artificial Sequence
  chemically synthesized
caatgttgtttggcatatgt

SEQ ID NO: 61047 - DNA, 20 bp, Artificial Sequence
  chemically synthesized
tttcaatgttgtttggcata

SEQ ID NO: 61048 - DNA, 20 bp, Artificial Sequence
  chemically synthesized
gtttcaatgttgtttggcat

SEQ ID NO: 61049 - DNA, 20 bp, Artificial Sequence
  chemically synthesized
aagaaatgaagagatgacca

SEQ ID NO: 61050 - DNA, 20 bp, Artificial Sequence
  chemically synthesized
tatccctggtataaatagac

SEQ ID NO: 61051 - DNA, 20 bp, Artificial Sequence
  chemically synthesized
gtatccctggtataaataga

SEQ ID NO: 61052 - DNA, 20 bp, Artificial Sequence
  chemically synthesized
tgtatccctggtataaatag

SEQ ID NO: 61053 - DNA, 20 bp, Artificial Sequence
  chemically synthesized
agtcagaactgggagccata

SEQ ID NO: 61054 - DNA, 20 bp, Artificial Sequence
  chemically synthesized
cccaacctcacacgttaagt

SEQ ID NO: 61055 - DNA, 20 bp, Artificial Sequence
  chemically synthesized
tgggaaaactgggacacagg

SEQ ID NO: 61056 - DNA, 20 bp, Artificial Sequence
  chemically synthesized
acttatgggaaaactgggac

SEQ ID NO: 61057 - DNA, 20 bp, Artificial Sequence
  chemically synthesized
gacttatgggaaaactggga

SEQ ID NO: 61058 - DNA, 20 bp, Artificial Sequence
  chemically synthesized
tttgacttatgggaaaactg

SEQ ID NO: 61059 - DNA, 20 bp, Artificial Sequence
  chemically synthesized
ctttgacttatgggaaaact

SEQ ID NO: 61060 - DNA, 20 bp, Artificial Sequence
  chemically synthesized
tctttgacttatgggaaaac

SEQ ID NO: 61061 - DNA, 20 bp, Artificial Sequence
  chemically synthesized
ttttctttgacttatgggaa

SEQ ID NO: 61062 - DNA, 20 bp, Artificial Sequence
  chemically synthesized
ttattttctttgacttatgg

SEQ ID NO: 61063 - DNA, 20 bp, Artificial Sequence
  chemically synthesized
ttgttattttctttgactta

SEQ ID NO: 61064 - DNA, 20 bp, Artificial Sequence
  chemically synthesized
attgttattttctttgactt

SEQ ID NO: 61065 - DNA, 20 bp, Artificial Sequence
  chemically synthesized
aagtatttattgttattttc

SEQ ID NO: 61066 - DNA, 20 bp, Artificial Sequence
  chemically synthesized
gaagtatttattgttatttt

SEQ ID NO: 61067 - DNA, 20 bp, Artificial Sequence
  chemically synthesized
tttgaagtatttattgttat

SEQ ID NO: 61068 - DNA, 20 bp, Artificial Sequence
  chemically synthesized
acagaagttctttgaagtat

SEQ ID NO: 61069 - DNA, 20 bp, Artificial Sequence
  chemically synthesized
ttcacagaagttctttgaag

SEQ ID NO: 61070 - DNA, 20 bp, Artificial Sequence
  chemically synthesized
tagaaatgggagtcaagtct

SEQ ID NO: 61071 - DNA, 20 bp, Artificial Sequence
  chemically synthesized
gtagaaatgggagtcaagtc

SEQ ID NO: 61072 - DNA, 20 bp, Artificial Sequence
  chemically synthesized
tgtagaaatgggagtcaagt

SEQ ID NO: 61073 - DNA, 20 bp, Artificial Sequence
  chemically synthesized
ccttttgtagaaatgggagt

SEQ ID NO: 61074 - DNA, 20 bp, Artificial Sequence
  chemically synthesized
accttttgtagaaatgggag

SEQ ID NO: 61075 - DNA, 20 bp, Artificial Sequence
  chemically synthesized
tttaccttttgtagaaatgg

SEQ ID NO: 61076 - DNA, 20 bp, Artificial Sequence
  chemically synthesized
atcagtgggcaggtgttctt

SEQ ID NO: 61077 - DNA, 20 bp, Artificial Sequence
  chemically synthesized
catcagtgggcaggtgttct

SEQ ID NO: 61078 - DNA, 20 bp, Artificial Sequence
  chemically synthesized
tcatcagtgggcaggtgttc

SEQ ID NO: 61079 - DNA, 20 bp, Artificial Sequence
  chemically synthesized
ttcatcagtgggcaggtgtt

SEQ ID NO: 61080 - DNA, 20 bp, Artificial Sequence
  chemically synthesized
taggcagcagaagacatttt

SEQ ID NO: 61081 - DNA, 20 bp, Artificial Sequence
  chemically synthesized
gtaggcagcagaagacattt

SEQ ID NO: 61082 - DNA, 20 bp, Artificial Sequence
  chemically synthesized
catggaggaaaagtagaatc

SEQ ID NO: 61083 - DNA, 20 bp, Artificial Sequence
  chemically synthesized
acatggaggaaaagtagaat

SEQ ID NO: 61084 - DNA, 20 bp, Artificial Sequence
  chemically synthesized
gagacagggcaaatgccaca

SEQ ID NO: 61085 - DNA, 20 bp, Artificial Sequence
  chemically synthesized
aaagtgccctgttggagaca

SEQ ID NO: 61086 - DNA, 20 bp, Artificial Sequence
  chemically synthesized
taaaatgctataaaagagcc

SEQ ID NO: 61087 - DNA, 20 bp, Artificial Sequence
  chemically synthesized
tattataaaatgctataaaa

SEQ ID NO: 61088 - DNA, 20 bp, Artificial Sequence
  chemically synthesized
ttatattataaaatgctata

SEQ ID NO: 61089 - DNA, 20 bp, Artificial Sequence
  chemically synthesized
ttattatattataaaatgct

SEQ ID NO: 61090 - DNA, 20 bp, Artificial Sequence
  chemically synthesized
gtaaacaaattattattata

SEQ ID NO: 61091 - DNA, 20 bp, Artificial Sequence
  chemically synthesized
caaaacctaatgaaagtgac

SEQ ID NO: 61092 - DNA, 20 bp, Artificial Sequence
  chemically synthesized
tgcctcataaattgcaaaac

SEQ ID NO: 61093 - DNA, 20 bp, Artificial Sequence
  chemically synthesized
ggcacaggggacctaaagac

SEQ ID NO: 61094 - DNA, 20 bp, Artificial Sequence
  chemically synthesized
tggaaagcctgctacatgtc

SEQ ID NO: 61095 - DNA, 20 bp, Artificial Sequence
  chemically synthesized
atggaaagcctgctacatgt

SEQ ID NO: 61096 - DNA, 20 bp, Artificial Sequence
  chemically synthesized
ataggcatttatggaaagcc

SEQ ID NO: 61097 - DNA, 20 bp, Artificial Sequence
  chemically synthesized
cacctccttgataggcattt

SEQ ID NO: 61098 - DNA, 20 bp, Artificial Sequence
  chemically synthesized
cttccacctccttgataggc

SEQ ID NO: 61099 - DNA, 20 bp, Artificial Sequence
  chemically synthesized
cataagcattccttccacct

SEQ ID NO: 61100 - DNA, 20 bp, Artificial Sequence
  chemically synthesized
aaagcacttccataagcatt

SEQ ID NO: 61101 - DNA, 20 bp, Artificial Sequence
  chemically synthesized
caaagcacttccataagcat

SEQ ID NO: 61102 - DNA, 20 bp, Artificial Sequence
  chemically synthesized
tcaaagcacttccataagca

SEQ ID NO: 61103 - DNA, 20 bp, Artificial Sequence
  chemically synthesized
caattttcaaagcacttcca

SEQ ID NO: 61104 - DNA, 20 bp, Artificial Sequence
  chemically synthesized
gcaattttcaaagcacttcc

SEQ ID NO: 61105 - DNA, 20 bp, Artificial Sequence
  chemically synthesized
tgcaattttcaaagcacttc

SEQ ID NO: 61106 - DNA, 20 bp, Artificial Sequence
  chemically synthesized
cctagtgcttttgcaatttt

SEQ ID NO: 61107 - DNA, 20 bp, Artificial Sequence
  chemically synthesized
gcctagtgcttttgcaattt

SEQ ID NO: 61108 - DNA, 20 bp, Artificial Sequence
  chemically synthesized
ggtttgcctagtgcttttgc

SEQ ID NO: 61109 - DNA, 20 bp, Artificial Sequence
  chemically synthesized
caaagtgctctcctctgcac

SEQ ID NO: 61110 - DNA, 20 bp, Artificial Sequence
  chemically synthesized
ccaaagtgctctcctctgca

SEQ ID NO: 61111 - DNA, 20 bp, Artificial Sequence
  chemically synthesized
ctttccaaagtgctctcctc

SEQ ID NO: 61112 - DNA, 20 bp, Artificial Sequence
  chemically synthesized
actttccaaagtgctctcct

SEQ ID NO: 61113 - DNA, 20 bp, Artificial Sequence
  chemically synthesized
tactttccaaagtgctctcc

SEQ ID NO: 61114 - DNA, 20 bp, Artificial Sequence
  chemically synthesized
aggtgaatgttttactttcc

SEQ ID NO: 61115 - DNA, 20 bp, Artificial Sequence
  chemically synthesized
ttcaggtgaatgttttactt

SEQ ID NO: 61116 - DNA, 20 bp, Artificial Sequence
  chemically synthesized
ttcttcaggtgaatgtttta

SEQ ID NO: 61117 - DNA, 20 bp, Artificial Sequence
  chemically synthesized
aaggactggtaagatcagac

SEQ ID NO: 61118 - DNA, 20 bp, Artificial Sequence
  chemically synthesized
gcttaaaggactggtaagat

SEQ ID NO: 61119 - DNA, 20 bp, Artificial Sequence
  chemically synthesized
tctgttggcttaaaggactg

SEQ ID NO: 61120 - DNA, 20 bp, Artificial Sequence
  chemically synthesized
actgtggatgaatggacctt

SEQ ID NO: 61121 - DNA, 20 bp, Artificial Sequence
  chemically synthesized
aactgtggatgaatggacct

SEQ ID NO: 61122 - DNA, 20 bp, Artificial Sequence
  chemically synthesized
taactgtggatgaatggacc

SEQ ID NO: 61123 - DNA, 20 bp, Artificial Sequence
  chemically synthesized
tctgtgaatggggttttaac

SEQ ID NO: 61124 - DNA, 20 bp, Artificial Sequence
  chemically synthesized
tgttgtctgtgaatggggtt

SEQ ID NO: 61125 - DNA, 20 bp, Artificial Sequence
  chemically synthesized
gtgttgtctgtgaatggggt

SEQ ID NO: 61126 - DNA, 20 bp, Artificial Sequence
  chemically synthesized
tgtgttgtctgtgaatgggg

SEQ ID NO: 61127 - DNA, 20 bp, Artificial Sequence
  chemically synthesized
ttttgtgttgtctgtgaatg

SEQ ID NO: 61128 - DNA, 20 bp, Artificial Sequence
  chemically synthesized
gttttgtgttgtctgtgaat

SEQ ID NO: 61129 - DNA, 20 bp, Artificial Sequence
  chemically synthesized
tgttttgtgttgtctgtgaa

SEQ ID NO: 61130 - DNA, 20 bp, Artificial Sequence
  chemically synthesized
ttttgttttgtgttgtctgt

SEQ ID NO: 61131 - DNA, 20 bp, Artificial Sequence
  chemically synthesized
gttttgttttgtgttgtctg

SEQ ID NO: 61132 - DNA, 20 bp, Artificial Sequence
  chemically synthesized
tttgttttgttttgtgttgt

SEQ ID NO: 61133 - DNA, 20 bp, Artificial Sequence
  chemically synthesized
ttgtttgttttgttttgtgt

SEQ ID NO: 61134 - DNA, 20 bp, Artificial Sequence
  chemically synthesized
cttgtttgttttgttttgtg

SEQ ID NO: 61135 - DNA, 20 bp, Artificial Sequence
  chemically synthesized
tcttgtttgttttgttttgt

SEQ ID NO: 61136 - DNA, 20 bp, Artificial Sequence
  chemically synthesized
gttttcttgtttgttttgtt

SEQ ID NO: 61137 - DNA, 20 bp, Artificial Sequence
  chemically synthesized
agttttcttgtttgttttgt

SEQ ID NO: 61138 - DNA, 20 bp, Artificial Sequence
  chemically synthesized
tagttttcttgtttgttttg

SEQ ID NO: 61139 - DNA, 20 bp, Artificial Sequence
  chemically synthesized
tgatattttagttttcttgt

SEQ ID NO: 61140 - DNA, 20 bp, Artificial Sequence
  chemically synthesized
ctgatattttagttttcttg

SEQ ID NO: 61141 - DNA, 20 bp, Artificial Sequence
  chemically synthesized
gggggactaggtgtttctga

SEQ ID NO: 61142 - DNA, 20 bp, Artificial Sequence
  chemically synthesized
agggggactaggtgtttctg

SEQ ID NO: 61143 - DNA, 20 bp, Artificial Sequence
  chemically synthesized
tttagggggactaggtgttt

SEQ ID NO: 61144 - DNA, 20 bp, Artificial Sequence
  chemically synthesized
atttagggggactaggtgtt

SEQ ID NO: 61145 - DNA, 20 bp, Artificial Sequence
  chemically synthesized
ctttatttagggggactagg

SEQ ID NO: 61146 - DNA, 20 bp, Artificial Sequence
  chemically synthesized
actttatttagggggactag

SEQ ID NO: 61147 - DNA, 20 bp, Artificial Sequence
  chemically synthesized
tactttatttagggggacta

SEQ ID NO: 61148 - DNA, 20 bp, Artificial Sequence
  chemically synthesized
ttactttatttagggggact

SEQ ID NO: 61149 - DNA, 20 bp, Artificial Sequence
  chemically synthesized
tgtttttactttatttaggg

SEQ ID NO: 61150 - DNA, 20 bp, Artificial Sequence
  chemically synthesized
ttctgtttttactttattta

SEQ ID NO: 61151 - DNA, 20 bp, Artificial Sequence
  chemically synthesized
gttctgtttttactttattt

SEQ ID NO: 61152 - DNA, 20 bp, Artificial Sequence
  chemically synthesized
tttgttctgtttttacttta

SEQ ID NO: 61153 - DNA, 20 bp, Artificial Sequence
  chemically synthesized
ttctttgttctgtttttact

SEQ ID NO: 61154 - DNA, 20 bp, Artificial Sequence
  chemically synthesized
cttctttgttctgtttttac

SEQ ID NO: 61155 - DNA, 20 bp, Artificial Sequence
  chemically synthesized
tcttctttgttctgttttta

SEQ ID NO: 61156 - DNA, 20 bp, Artificial Sequence
  chemically synthesized
aattttcttctttgttctgt

SEQ ID NO: 61157 - DNA, 20 bp, Artificial Sequence
  chemically synthesized
gaattttcttctttgttctg

SEQ ID NO: 61158 - DNA, 20 bp, Artificial Sequence
  chemically synthesized
tgaattttcttctttgttct

SEQ ID NO: 61159 - DNA, 20 bp, Artificial Sequence
  chemically synthesized
tgttttgaattttcttcttt

SEQ ID NO: 61160 - DNA, 20 bp, Artificial Sequence
  chemically synthesized
ctgttttgaattttcttctt

SEQ ID NO: 61161 - DNA, 20 bp, Artificial Sequence
  chemically synthesized
tctgttttgaattttcttct

SEQ ID NO: 61162 - DNA, 20 bp, Artificial Sequence
  chemically synthesized
ttctgttttgaattttcttc

SEQ ID NO: 61163 - DNA, 20 bp, Artificial Sequence
  chemically synthesized
ctactgtttttctgttttga

SEQ ID NO: 61164 - DNA, 20 bp, Artificial Sequence
  chemically synthesized
ttgctactgtttttctgttt

SEQ ID NO: 61165 - DNA, 20 bp, Artificial Sequence
  chemically synthesized
gttgctactgtttttctgtt

SEQ ID NO: 61166 - DNA, 20 bp, Artificial Sequence
  chemically synthesized
agatttgttgctactgtttt

SEQ ID NO: 61167 - DNA, 20 bp, Artificial Sequence
  chemically synthesized
gagatttgttgctactgttt

SEQ ID NO: 61168 - DNA, 20 bp, Artificial Sequence
  chemically synthesized
tttgagatttgttgctactg

SEQ ID NO: 61169 - DNA, 20 bp, Artificial Sequence
  chemically synthesized
gtttgagatttgttgctact

SEQ ID NO: 61170 - DNA, 20 bp, Artificial Sequence
  chemically synthesized
tgtttgagatttgttgctac

SEQ ID NO: 61171 - DNA, 20 bp, Artificial Sequence
  chemically synthesized
atggttttgtttgagatttg

SEQ ID NO: 61172 - DNA, 20 bp, Artificial Sequence
  chemically synthesized
acagaaccacaaagggcaga

SEQ ID NO: 61173 - DNA, 20 bp, Artificial Sequence
  chemically synthesized
taatgactaactcaaagtca

SEQ ID NO: 61174 - DNA, 20 bp, Artificial Sequence
  chemically synthesized
gtctagactgacttctaatg

SEQ ID NO: 61175 - DNA, 20 bp, Artificial Sequence
  chemically synthesized
ttggtctagactgacttcta

SEQ ID NO: 61176 - DNA, 20 bp, Artificial Sequence
  chemically synthesized
cttggtctagactgacttct

SEQ ID NO: 61177 - DNA, 20 bp, Artificial Sequence
  chemically synthesized
cctttcttggtctagactga

SEQ ID NO: 61178 - DNA, 20 bp, Artificial Sequence
  chemically synthesized
acatatatcatcttgccttt

SEQ ID NO: 61179 - DNA, 20 bp, Artificial Sequence
  chemically synthesized
atgcttgacatatatcatct

SEQ ID NO: 61180 - DNA, 20 bp, Artificial Sequence
  chemically synthesized
ttaatgcttgacatatatca

SEQ ID NO: 61181 - DNA, 20 bp, Artificial Sequence
  chemically synthesized
aagatatacggaagagacgt

SEQ ID NO: 61182 - DNA, 20 bp, Artificial Sequence
  chemically synthesized
caagtacatgcaatgagtga

SEQ ID NO: 61183 - DNA, 20 bp, Artificial Sequence
  chemically synthesized
agggagaaagagttacaagt

SEQ ID NO: 61184 - DNA, 20 bp, Artificial Sequence
  chemically synthesized
tccagcaatagaggctgcca

SEQ ID NO: 61185 - DNA, 20 bp, Artificial Sequence
  chemically synthesized
tcccaagttctccagcaata

SEQ ID NO: 61186 - DNA, 20 bp, Artificial Sequence
  chemically synthesized
atccctaaattgtcccaagt

SEQ ID NO: 61187 - DNA, 20 bp, Artificial Sequence
  chemically synthesized
acgagtgagaggaggcatga

SEQ ID NO: 61188 - DNA, 20 bp, Artificial Sequence
  chemically synthesized
gacgagtgagaggaggcatg

SEQ ID NO: 61189 - DNA, 20 bp, Artificial Sequence
  chemically synthesized
ctgctaccacccaactgcat

SEQ ID NO: 61190 - DNA, 20 bp, Artificial Sequence
  chemically synthesized
tcttgctgctaccacccaac

SEQ ID NO: 61191 - DNA, 20 bp, Artificial Sequence
  chemically synthesized
ccaagacagtgattctcttg

SEQ ID NO: 61192 - DNA, 20 bp, Artificial Sequence
  chemically synthesized
ttaccaagacagtgattctc

SEQ ID NO: 61193 - DNA, 20 bp, Artificial Sequence
  chemically synthesized
gttaccaagacagtgattct

SEQ ID NO: 61194 - DNA, 20 bp, Artificial Sequence
  chemically synthesized
tttgttaccaagacagtgat

SEQ ID NO: 61195 - DNA, 20 bp, Artificial Sequence
  chemically synthesized
tcttgtttgttaccaagaca

SEQ ID NO: 61196 - DNA, 20 bp, Artificial Sequence
  chemically synthesized
ctcttgtttgttaccaagac

SEQ ID NO: 61197 - DNA, 20 bp, Artificial Sequence
  chemically synthesized
gaaactcacaatttctcttg

SEQ ID NO: 61198 - DNA, 20 bp, Artificial Sequence
  chemically synthesized
tgaaaataggctcaagaggg

SEQ ID NO: 61199 - DNA, 20 bp, Artificial Sequence
  chemically synthesized
ctgaaaataggctcaagagg

SEQ ID NO: 61200 - DNA, 20 bp, Artificial Sequence
  chemically synthesized
tctgaaaataggctcaagag

SEQ ID NO: 61201 - DNA, 20 bp, Artificial Sequence
  chemically synthesized
ttctgaaaataggctcaaga

SEQ ID NO: 61202 - DNA, 20 bp, Artificial Sequence
  chemically synthesized
atttttctgaaaataggctc

SEQ ID NO: 61203 - DNA, 20 bp, Artificial Sequence
  chemically synthesized
catttttctgaaaataggct

SEQ ID NO: 61204 - DNA, 20 bp, Artificial Sequence
  chemically synthesized
gtttcatttttctgaaaata

SEQ ID NO: 61205 - DNA, 20 bp, Artificial Sequence
  chemically synthesized
ggtttcatttttctgaaaat

SEQ ID NO: 61206 - DNA, 20 bp, Artificial Sequence
  chemically synthesized
cgggtgtgaagtcccatgac

SEQ ID NO: 61207 - DNA, 20 bp, Artificial Sequence
  chemically synthesized
aaatggctatgagaaagaaa

SEQ ID NO: 61208 - DNA, 20 bp, Artificial Sequence
  chemically synthesized
aattaaaatggctatgagaa

SEQ ID NO: 61209 - DNA, 20 bp, Artificial Sequence
  chemically synthesized
catataatccctccgggaca

SEQ ID NO: 61210 - DNA, 20 bp, Artificial Sequence
  chemically synthesized
gaaagtgaaagggaaactta

SEQ ID NO: 61211 - DNA, 20 bp, Artificial Sequence
  chemically synthesized
ggaaagtgaaagggaaactt

SEQ ID NO: 61212 - DNA, 20 bp, Artificial Sequence
  chemically synthesized
tgatccaaactgagtcagtt

SEQ ID NO: 61213 - DNA, 20 bp, Artificial Sequence
  chemically synthesized
atgatccaaactgagtcagt

SEQ ID NO: 61214 - DNA, 20 bp, Artificial Sequence
  chemically synthesized
agtgccaaacgtcactagta

SEQ ID NO: 61215 - DNA, 20 bp, Artificial Sequence
  chemically synthesized
ttgagtgccaaacgtcacta

SEQ ID NO: 61216 - DNA, 20 bp, Artificial Sequence
  chemically synthesized
actgaggactgccccattct

SEQ ID NO: 61217 - DNA, 20 bp, Artificial Sequence
  chemically synthesized
tcttcactgaggactgcccc

SEQ ID NO: 61218 - DNA, 20 bp, Artificial Sequence
  chemically synthesized
ctcttcactgaggactgccc

SEQ ID NO: 61219 - DNA, 20 bp, Artificial Sequence
  chemically synthesized
cctgagccatgtgcctttct

SEQ ID NO: 61220 - DNA, 20 bp, Artificial Sequence
  chemically synthesized
cagttccctgagccatgtgc

SEQ ID NO: 61221 - DNA, 20 bp, Artificial Sequence
  chemically synthesized
acacagtgaagggaggggcc

SEQ ID NO: 61222 - DNA, 20 bp, Artificial Sequence
  chemically synthesized
ttcacacagtgaagggaggg

SEQ ID NO: 61223 - DNA, 20 bp, Artificial Sequence
  chemically synthesized
tccaagttgttcacacagtg

SEQ ID NO: 61224 - DNA, 20 bp, Artificial Sequence
  chemically synthesized
agtaacttgtccaagttgtt

SEQ ID NO: 61225 - DNA, 20 bp, Artificial Sequence
  chemically synthesized
agaactaaggagttaagtaa

SEQ ID NO: 61226 - DNA, 20 bp, Artificial Sequence
  chemically synthesized
aattcagaactaaggagtta

SEQ ID NO: 61227 - DNA, 20 bp, Artificial Sequence
  chemically synthesized
tagatcattaaattcagaac

SEQ ID NO: 61228 - DNA, 20 bp, Artificial Sequence
  chemically synthesized
atagatcattaaattcagaa

SEQ ID NO: 61229 - DNA, 20 bp, Artificial Sequence
  chemically synthesized
tatagatcattaaattcaga

SEQ ID NO: 61230 - DNA, 20 bp, Artificial Sequence
  chemically synthesized
ttatagatcattaaattcag

SEQ ID NO: 61231 - DNA, 20 bp, Artificial Sequence
  chemically synthesized
tttatagatcattaaattca

SEQ ID NO: 61232 - DNA, 20 bp, Artificial Sequence
  chemically synthesized
ctacgactactctctttttt

SEQ ID NO: 61233 - DNA, 20 bp, Artificial Sequence
  chemically synthesized
tctcactccatcctgacaat

SEQ ID NO: 61234 - DNA, 20 bp, Artificial Sequence
  chemically synthesized
caagtgctctgcgcaccttg

SEQ ID NO: 61235 - DNA, 20 bp, Artificial Sequence
  chemically synthesized
gcaagtgctctgcgcacctt

SEQ ID NO: 61236 - DNA, 20 bp, Artificial Sequence
  chemically synthesized
atatatatccagtgctttgc

SEQ ID NO: 61237 - DNA, 20 bp, Artificial Sequence
  chemically synthesized
aatatatatccagtgctttg

SEQ ID NO: 61238 - DNA, 20 bp, Artificial Sequence
  chemically synthesized
ggatttaatatatatccagt

SEQ ID NO: 61239 - DNA, 20 bp, Artificial Sequence
  chemically synthesized
ttaggatttaatatatatcc

SEQ ID NO: 61240 - DNA, 20 bp, Artificial Sequence
  chemically synthesized
ccattattaggatttaatat

SEQ ID NO: 61241 - DNA, 20 bp, Artificial Sequence
  chemically synthesized
aggagtgaggaaggcaggaa

SEQ ID NO: 61242 - DNA, 20 bp, Artificial Sequence
  chemically synthesized
aaaaaaaaagaggaaagaat

SEQ ID NO: 61243 - DNA, 20 bp, Artificial Sequence
  chemically synthesized
aaaaaaaaaagaggaaagaa

SEQ ID NO: 61244 - DNA, 20 bp, Artificial Sequence
  chemically synthesized
agctatttaaaaaaaaaaga

SEQ ID NO: 61245 - DNA, 20 bp, Artificial Sequence
  chemically synthesized
aggtgacccaatgattcagc

SEQ ID NO: 61246 - DNA, 20 bp, Artificial Sequence
  chemically synthesized
aaggtgacccaatgattcag

SEQ ID NO: 61247 - DNA, 20 bp, Artificial Sequence
  chemically synthesized
gtcacaaggtttaaggtgac

SEQ ID NO: 61248 - DNA, 20 bp, Artificial Sequence
  chemically synthesized
ggtcacaaggtttaaggtga

SEQ ID NO: 61249 - DNA, 20 bp, Artificial Sequence
  chemically synthesized
taccatgtggatttggtcac

SEQ ID NO: 61250 - DNA, 20 bp, Artificial Sequence
  chemically synthesized
agtggcactcaacatgagtc

SEQ ID NO: 61251 - DNA, 20 bp, Artificial Sequence
  chemically synthesized
ctgagttcagtggcactcaa

SEQ ID NO: 61252 - DNA, 20 bp, Artificial Sequence
  chemically synthesized
accactcttcctgagttcag

SEQ ID NO: 61253 - DNA, 20 bp, Artificial Sequence
  chemically synthesized
gaccactcttcctgagttca

SEQ ID NO: 61254 - DNA, 20 bp, Artificial Sequence
  chemically synthesized
ctttgaccactcttcctgag

SEQ ID NO: 61255 - DNA, 20 bp, Artificial Sequence
  chemically synthesized
tgaaacattgctttgaccac

SEQ ID NO: 61256 - DNA, 20 bp, Artificial Sequence
  chemically synthesized
gcaaaaccccactacacagt

SEQ ID NO: 61257 - DNA, 20 bp, Artificial Sequence
  chemically synthesized
ctagtctccctcacagcaca

SEQ ID NO: 61258 - DNA, 20 bp, Artificial Sequence
  chemically synthesized
aaagggaagtctagagttcc

SEQ ID NO: 61259 - DNA, 20 bp, Artificial Sequence
  chemically synthesized
aaaagggaagtctagagttc

SEQ ID NO: 61260 - DNA, 20 bp, Artificial Sequence
  chemically synthesized
ccgtgagcgacaaagatgat

SEQ ID NO: 61261 - DNA, 20 bp, Artificial Sequence
  chemically synthesized
taccaaaaccagtgaagtgt

SEQ ID NO: 61262 - DNA, 20 bp, Artificial Sequence
  chemically synthesized
cctgggatcaaatcaagaag

SEQ ID NO: 61263 - DNA, 20 bp, Artificial Sequence
  chemically synthesized
cttccctgggatcaaatcaa

SEQ ID NO: 61264 - DNA, 20 bp, Artificial Sequence
  chemically synthesized
ttacttccctgggatcaaat

SEQ ID NO: 61265 - DNA, 20 bp, Artificial Sequence
  chemically synthesized
ctcagggtcagcccattctt

SEQ ID NO: 61266 - DNA, 20 bp, Artificial Sequence
  chemically synthesized
aacccagttgctcagggtca

SEQ ID NO: 61267 - DNA, 20 bp, Artificial Sequence
  chemically synthesized
tctccaatctggaatcctga

SEQ ID NO: 61268 - DNA, 20 bp, Artificial Sequence
  chemically synthesized
ctctccaatctggaatcctg

SEQ ID NO: 61269 - DNA, 20 bp, Artificial Sequence
  chemically synthesized
tctctccaatctggaatcct

SEQ ID NO: 61270 - DNA, 20 bp, Artificial Sequence
  chemically synthesized
ggactacaaacagcacgctg

SEQ ID NO: 61271 - DNA, 20 bp, Artificial Sequence
  chemically synthesized
gccttgggactacaaacagc

SEQ ID NO: 61272 - DNA, 20 bp, Artificial Sequence
  chemically synthesized
caggtccctagactgcaggg

SEQ ID NO: 61273 - DNA, 20 bp, Artificial Sequence
  chemically synthesized
tctcctcttccaggtcccta

SEQ ID NO: 61274 - DNA, 20 bp, Artificial Sequence
  chemically synthesized
atccctcacatgcctggctg

SEQ ID NO: 61275 - DNA, 20 bp, Artificial Sequence
  chemically synthesized
gaagagattcatccctcaca

SEQ ID NO: 61276 - DNA, 20 bp, Artificial Sequence
  chemically synthesized
ggaagagattcatccctcac

SEQ ID NO: 61277 - DNA, 20 bp, Artificial Sequence
  chemically synthesized
gaggggatgtgcagagcccc

SEQ ID NO: 61278 - DNA, 20 bp, Artificial Sequence
  chemically synthesized
ctcagcaactagaagaatct

SEQ ID NO: 61279 - DNA, 20 bp, Artificial Sequence
  chemically synthesized
cctcagcaactagaagaatc

SEQ ID NO: 61280 - DNA, 20 bp, Artificial Sequence
  chemically synthesized
tgcaagatacgtttcctcag

SEQ ID NO: 61281 - DNA, 20 bp, Artificial Sequence
  chemically synthesized
ctgcaagatacgtttcctca

SEQ ID NO: 61282 - DNA, 20 bp, Artificial Sequence
  chemically synthesized
tctgcaagatacgtttcctc

SEQ ID NO: 61283 - DNA, 20 bp, Artificial Sequence
  chemically synthesized
aagctagagatgaagtggaa

SEQ ID NO: 61284 - DNA, 20 bp, Artificial Sequence
  chemically synthesized
atagggtggatgacattcaa

SEQ ID NO: 61285 - DNA, 20 bp, Artificial Sequence
  chemically synthesized
ctggactgccagattcatag

SEQ ID NO: 61286 - DNA, 20 bp, Artificial Sequence
  chemically synthesized
cctggactgccagattcata

SEQ ID NO: 61287 - DNA, 20 bp, Artificial Sequence
  chemically synthesized
aatcctgaaagtttcctgga

SEQ ID NO: 61288 - DNA, 20 bp, Artificial Sequence
  chemically synthesized
caatcctgaaagtttcctgg

SEQ ID NO: 61289 - DNA, 20 bp, Artificial Sequence
  chemically synthesized
aatgtgagtttcaatcctga

SEQ ID NO: 61290 - DNA, 20 bp, Artificial Sequence
  chemically synthesized
aaatgtgagtttcaatcctg

SEQ ID NO: 61291 - DNA, 20 bp, Artificial Sequence
  chemically synthesized
tgtgcagaatttaaatgtga

SEQ ID NO: 61292 - DNA, 20 bp, Artificial Sequence
  chemically synthesized
ctgtgcagaatttaaatgtg

SEQ ID NO: 61293 - DNA, 20 bp, Artificial Sequence
  chemically synthesized
tctgtgcagaatttaaatgt

SEQ ID NO: 61294 - DNA, 20 bp, Artificial Sequence
  chemically synthesized
ttctgtgcagaatttaaatg

SEQ ID NO: 61295 - DNA, 20 bp, Artificial Sequence
  chemically synthesized
tcctttttctgtgcagaatt

SEQ ID NO: 61296 - DNA, 20 bp, Artificial Sequence
  chemically synthesized
ctcctttttctgtgcagaat

SEQ ID NO: 61297 - DNA, 20 bp, Artificial Sequence
  chemically synthesized
ataccctttctcctttttct

SEQ ID NO: 61298 - DNA, 20 bp, Artificial Sequence
  chemically synthesized
atggtgtgtctctctggtgc

SEQ ID NO: 61299 - DNA, 20 bp, Artificial Sequence
  chemically synthesized
gatggtgtgtctctctggtg

SEQ ID NO: 61300 - DNA, 20 bp, Artificial Sequence
  chemically synthesized
cctgtcagaaaactctatag

SEQ ID NO: 61301 - DNA, 20 bp, Artificial Sequence
  chemically synthesized
tgtgacattccctgtcagaa

SEQ ID NO: 61302 - DNA, 20 bp, Artificial Sequence
  chemically synthesized
aggaacatgctggcaattct

SEQ ID NO: 61303 - DNA, 20 bp, Artificial Sequence
  chemically synthesized
aagtgtctcagaagctccag

SEQ ID NO: 61304 - DNA, 20 bp, Artificial Sequence
  chemically synthesized
aagtcttgaagtgtctcaga

SEQ ID NO: 61305 - DNA, 20 bp, Artificial Sequence
  chemically synthesized
tgggctccctggggctggag

SEQ ID NO: 61306 - DNA, 20 bp, Artificial Sequence
  chemically synthesized
atcctgtaactagggtccct

SEQ ID NO: 61307 - DNA, 20 bp, Artificial Sequence
  chemically synthesized
attcatcctgtaactagggt

SEQ ID NO: 61308 - DNA, 20 bp, Artificial Sequence
  chemically synthesized
gattcatcctgtaactaggg

SEQ ID NO: 61309 - DNA, 20 bp, Artificial Sequence
  chemically synthesized
gtatttgattcatcctgtaa

SEQ ID NO: 61310 - DNA, 20 bp, Artificial Sequence
  chemically synthesized
ggtatttgattcatcctgta

SEQ ID NO: 61311 - DNA, 20 bp, Artificial Sequence
  chemically synthesized
tggtatttgattcatcctgt

SEQ ID NO: 61312 - DNA, 20 bp, Artificial Sequence
  chemically synthesized
aacctcaccttttggtattt

SEQ ID NO: 61313 - DNA, 20 bp, Artificial Sequence
  chemically synthesized
caggacaaggaacagttgaa

SEQ ID NO: 61314 - DNA, 20 bp, Artificial Sequence
  chemically synthesized
gcaacatcccagtggccaag

SEQ ID NO: 61315 - DNA, 20 bp, Artificial Sequence
  chemically synthesized
tgttggcaacatcccagtgg

SEQ ID NO: 61316 - DNA, 20 bp, Artificial Sequence
  chemically synthesized
aaaagtgttgtgttggcaac

SEQ ID NO: 61317 - DNA, 20 bp, Artificial Sequence
  chemically synthesized
gtgcttaaaaagtgttgtgt

SEQ ID NO: 61318 - DNA, 20 bp, Artificial Sequence
  chemically synthesized
ggtgcttaaaaagtgttgtg

SEQ ID NO: 61319 - DNA, 20 bp, Artificial Sequence
  chemically synthesized
tggtgcttaaaaagtgttgt

SEQ ID NO: 61320 - DNA, 20 bp, Artificial Sequence
  chemically synthesized
ttggtgcttaaaaagtgttg

SEQ ID NO: 61321 - DNA, 20 bp, Artificial Sequence
  chemically synthesized
taagaaaccaagaaaagtga

SEQ ID NO: 61322 - DNA, 20 bp, Artificial Sequence
  chemically synthesized
gtaagaaaccaagaaaagtg

SEQ ID NO: 61323 - DNA, 20 bp, Artificial Sequence
  chemically synthesized
agcctatcgtatggcccagt

SEQ ID NO: 61324 - DNA, 20 bp, Artificial Sequence
  chemically synthesized
aggattaagcctatcgtatg

SEQ ID NO: 61325 - DNA, 20 bp, Artificial Sequence
  chemically synthesized
caggattaagcctatcgtat

SEQ ID NO: 61326 - DNA, 20 bp, Artificial Sequence
  chemically synthesized
tctgatttcaggattaagcc

SEQ ID NO: 61327 - DNA, 20 bp, Artificial Sequence
  chemically synthesized
atctatcaatgttctctgat

SEQ ID NO: 61328 - DNA, 20 bp, Artificial Sequence
  chemically synthesized
acttcatctatcaatgttct

SEQ ID NO: 61329 - DNA, 20 bp, Artificial Sequence
  chemically synthesized
caagctcagaataagtggga

SEQ ID NO: 61330 - DNA, 20 bp, Artificial Sequence
  chemically synthesized
tgattccaagctcagaataa

SEQ ID NO: 61331 - DNA, 20 bp, Artificial Sequence
  chemically synthesized
ttctgattccaagctcagaa

SEQ ID NO: 61332 - DNA, 20 bp, Artificial Sequence
  chemically synthesized
gagccaagactagaaatctg

SEQ ID NO: 61333 - DNA, 20 bp, Artificial Sequence
  chemically synthesized
tgttagagccaagactagaa

SEQ ID NO: 61334 - DNA, 20 bp, Artificial Sequence
  chemically synthesized
accatggtcacccacctaat

SEQ ID NO: 61335 - DNA, 20 bp, Artificial Sequence
  chemically synthesized
atagggccccgaggcccaga

SEQ ID NO: 61336 - DNA, 20 bp, Artificial Sequence
  chemically synthesized
aattgatagggccccgaggc

SEQ ID NO: 61337 - DNA, 20 bp, Artificial Sequence
  chemically synthesized
atatctgtggtctctggtcc

SEQ ID NO: 61338 - DNA, 20 bp, Artificial Sequence
  chemically synthesized
acagaatggattgatatctg

SEQ ID NO: 61339 - DNA, 20 bp, Artificial Sequence
  chemically synthesized
ttcacagaatggattgatat

SEQ ID NO: 61340 - DNA, 20 bp, Artificial Sequence
  chemically synthesized
tcatgtcttgttcacagaat

SEQ ID NO: 61341 - DNA, 20 bp, Artificial Sequence
  chemically synthesized
ttgtcatgtcttgttcacag

SEQ ID NO: 61342 - DNA, 20 bp, Artificial Sequence
  chemically synthesized
ccagaggtatattattgtca

SEQ ID NO: 61343 - DNA, 20 bp, Artificial Sequence
  chemically synthesized
cccagaggtatattattgtc

SEQ ID NO: 61344 - DNA, 20 bp, Artificial Sequence
  chemically synthesized
tcccagaggtatattattgt

SEQ ID NO: 61345 - DNA, 20 bp, Artificial Sequence
  chemically synthesized
ttcccagaggtatattattg

SEQ ID NO: 61346 - DNA, 20 bp, Artificial Sequence
  chemically synthesized
cctctagggctttttcccag

SEQ ID NO: 61347 - DNA, 20 bp, Artificial Sequence
  chemically synthesized
cttccctctagggctttttc

SEQ ID NO: 61348 - DNA, 20 bp, Artificial Sequence
  chemically synthesized
gtgttccttccctctagggc

SEQ ID NO: 61349 - DNA, 20 bp, Artificial Sequence
  chemically synthesized
caagccttggtgttccttcc

SEQ ID NO: 61350 - DNA, 20 bp, Artificial Sequence
  chemically synthesized
cctccttgcaagccttggtg

SEQ ID NO: 61351 - DNA, 20 bp, Artificial Sequence
  chemically synthesized
catagctgcaccaaaattac

SEQ ID NO: 61352 - DNA, 20 bp, Artificial Sequence
  chemically synthesized
cttccatagctgcaccaaaa

SEQ ID NO: 61353 - DNA, 20 bp, Artificial Sequence
  chemically synthesized
acttccatagctgcaccaaa

SEQ ID NO: 61354 - DNA, 20 bp, Artificial Sequence
  chemically synthesized
aatttacttccatagctgca

SEQ ID NO: 61355 - DNA, 20 bp, Artificial Sequence
  chemically synthesized
ggagtaaacaacggggttaa

SEQ ID NO: 61356 - DNA, 20 bp, Artificial Sequence
  chemically synthesized
aattgggagtaaacaacggg

SEQ ID NO: 61357 - DNA, 20 bp, Artificial Sequence
  chemically synthesized
ctgtcagtaaagagaagaaa

SEQ ID NO: 61358 - DNA, 20 bp, Artificial Sequence
  chemically synthesized
gctgccagagttgctgtcag

SEQ ID NO: 61359 - DNA, 20 bp, Artificial Sequence
  chemically synthesized
caccaaaattagctgccaga

SEQ ID NO: 61360 - DNA, 20 bp, Artificial Sequence
  chemically synthesized
ccccacttccaccaaaatta

SEQ ID NO: 61361 - DNA, 20 bp, Artificial Sequence
  chemically synthesized
aaaatattcccccacttcca

SEQ ID NO: 61362 - DNA, 20 bp, Artificial Sequence
  chemically synthesized
gaaaatattcccccacttcc

SEQ ID NO: 61363 - DNA, 20 bp, Artificial Sequence
  chemically synthesized
cctgggtaatttgaaaatat

SEQ ID NO: 61364 - DNA, 20 bp, Artificial Sequence
  chemically synthesized
ccctgggtaatttgaaaata

SEQ ID NO: 61365 - DNA, 20 bp, Artificial Sequence
  chemically synthesized
aaaagtactgcctggaaagt

SEQ ID NO: 61366 - DNA, 20 bp, Artificial Sequence
  chemically synthesized
gaaaagtactgcctggaaag

SEQ ID NO: 61367 - DNA, 20 bp, Artificial Sequence
  chemically synthesized
caaataccctaatttgaaaa

SEQ ID NO: 61368 - DNA, 20 bp, Artificial Sequence
  chemically synthesized
gcagaaggctacatatcccc

SEQ ID NO: 61369 - DNA, 20 bp, Artificial Sequence
  chemically synthesized
taggagaatgcccttggcag

SEQ ID NO: 61370 - DNA, 20 bp, Artificial Sequence
  chemically synthesized
ctattctaggagaatgccct

SEQ ID NO: 61371 - DNA, 20 bp, Artificial Sequence
  chemically synthesized
cttactattctaggagaatg

SEQ ID NO: 61372 - DNA, 20 bp, Artificial Sequence
  chemically synthesized
aattacttactattctagga

SEQ ID NO: 61373 - DNA, 20 bp, Artificial Sequence
  chemically synthesized
ttaaattacttactattcta

SEQ ID NO: 61374 - DNA, 20 bp, Artificial Sequence
  chemically synthesized
aacatgcacttgttaaatta

SEQ ID NO: 61375 - DNA, 20 bp, Artificial Sequence
  chemically synthesized
aaacatgcacttgttaaatt

SEQ ID NO: 61376 - DNA, 20 bp, Artificial Sequence
  chemically synthesized
taaacatgcacttgttaaat

SEQ ID NO: 61377 - DNA, 20 bp, Artificial Sequence
  chemically synthesized
atcataaaaatgatgtttta

SEQ ID NO: 61378 - DNA, 20 bp, Artificial Sequence
  chemically synthesized
catcataaaaatgatgtttt

SEQ ID NO: 61379 - DNA, 20 bp, Artificial Sequence
  chemically synthesized
tttcatcataaaaatgatgt

SEQ ID NO: 61380 - DNA, 20 bp, Artificial Sequence
  chemically synthesized
gtttcatcataaaaatgatg

SEQ ID NO: 61381 - DNA, 20 bp, Artificial Sequence
  chemically synthesized
tactaatccatgctaaggct

SEQ ID NO: 61382 - DNA, 20 bp, Artificial Sequence
  chemically synthesized
atactaatccatgctaaggc

SEQ ID NO: 61383 - DNA, 20 bp, Artificial Sequence
  chemically synthesized
tatactaatccatgctaagg

SEQ ID NO: 61384 - DNA, 20 bp, Artificial Sequence
  chemically synthesized
ttatactaatccatgctaag

SEQ ID NO: 61385 - DNA, 20 bp, Artificial Sequence
  chemically synthesized
tttatactaatccatgctaa

SEQ ID NO: 61386 - DNA, 20 bp, Artificial Sequence
  chemically synthesized
atgggattttttatactaat

SEQ ID NO: 61387 - DNA, 20 bp, Artificial Sequence
  chemically synthesized
agcatataaattcatgggat

SEQ ID NO: 61388 - DNA, 20 bp, Artificial Sequence
  chemically synthesized
aagcatataaattcatggga

SEQ ID NO: 61389 - DNA, 20 bp, Artificial Sequence
  chemically synthesized
actttaagcatataaattca

SEQ ID NO: 61390 - DNA, 20 bp, Artificial Sequence
  chemically synthesized
aagtcttgactttaagcata

SEQ ID NO: 61391 - DNA, 20 bp, Artificial Sequence
  chemically synthesized
atggcaaatgcacaatgtac

SEQ ID NO: 61392 - DNA, 20 bp, Artificial Sequence
  chemically synthesized
cagaagccatcattcatggc

SEQ ID NO: 61393 - DNA, 20 bp, Artificial Sequence
  chemically synthesized
cagtatctcctaaaggttgc

SEQ ID NO: 61394 - DNA, 20 bp, Artificial Sequence
  chemically synthesized
ttccagtatctcctaaaggt

SEQ ID NO: 61395 - DNA, 20 bp, Artificial Sequence
  chemically synthesized
cttccagtatctcctaaagg

SEQ ID NO: 61396 - DNA, 20 bp, Artificial Sequence
  chemically synthesized
tcttccagtatctcctaaag

SEQ ID NO: 61397 - DNA, 20 bp, Artificial Sequence
  chemically synthesized
ccaagcttttcttccagtat

SEQ ID NO: 61398 - DNA, 20 bp, Artificial Sequence
  chemically synthesized
cccaagcttttcttccagta

SEQ ID NO: 61399 - DNA, 20 bp, Artificial Sequence
  chemically synthesized
cgtaatgcaatgtttcccaa

SEQ ID NO: 61400 - DNA, 20 bp, Artificial Sequence
  chemically synthesized
ggcaaacgctgtccccaaag

SEQ ID NO: 61401 - DNA, 20 bp, Artificial Sequence
  chemically synthesized
actggacattaggcaaacgc

SEQ ID NO: 61402 - DNA, 20 bp, Artificial Sequence
  chemically synthesized
ataagaggcaaaaagatatt

SEQ ID NO: 61403 - DNA, 20 bp, Artificial Sequence
  chemically synthesized
cataagaggcaaaaagatat

SEQ ID NO: 61404 - DNA, 20 bp, Artificial Sequence
  chemically synthesized
atttcataagaggcaaaaag

SEQ ID NO: 61405 - DNA, 20 bp, Artificial Sequence
  chemically synthesized
cacagttaatttcataagag

SEQ ID NO: 61406 - DNA, 20 bp, Artificial Sequence
  chemically synthesized
ccacagttaatttcataaga

SEQ ID NO: 61407 - DNA, 20 bp, Artificial Sequence
  chemically synthesized
gtgcccagtatccctatcta

SEQ ID NO: 61408 - DNA, 20 bp, Artificial Sequence
  chemically synthesized
agtgcccagtatccctatct

SEQ ID NO: 61409 - DNA, 20 bp, Artificial Sequence
  chemically synthesized
acgaatttagtgcccagtat

SEQ ID NO: 61410 - DNA, 20 bp, Artificial Sequence
  chemically synthesized
cacgaatttagtgcccagta

SEQ ID NO: 61411 - DNA, 20 bp, Artificial Sequence
  chemically synthesized
aggcatttcacgaatttagt

SEQ ID NO: 61412 - DNA, 20 bp, Artificial Sequence
  chemically synthesized
atgagaaaaccacaaagggg

SEQ ID NO: 61413 - DNA, 20 bp, Artificial Sequence
  chemically synthesized
ttgatgagaaaaccacaaag

SEQ ID NO: 61414 - DNA, 20 bp, Artificial Sequence
  chemically synthesized
attgatgagaaaaccacaaa

SEQ ID NO: 61415 - DNA, 20 bp, Artificial Sequence
  chemically synthesized
agccccatttattgatgaga

SEQ ID NO: 61416 - DNA, 20 bp, Artificial Sequence
  chemically synthesized
tgtgggatcacggacagtca

SEQ ID NO: 61417 - DNA, 20 bp, Artificial Sequence
  chemically synthesized
aactaataaagagggtgatt

SEQ ID NO: 61418 - DNA, 20 bp, Artificial Sequence
  chemically synthesized
ttcaactaataaagagggtg

SEQ ID NO: 61419 - DNA, 20 bp, Artificial Sequence
  chemically synthesized
tggaaaaaaaggtgaccttc

SEQ ID NO: 61420 - DNA, 20 bp, Artificial Sequence
  chemically synthesized
gcctgtgtgttatggaaaaa

SEQ ID NO: 61421 - DNA, 20 bp, Artificial Sequence
  chemically synthesized
gtcatcttggcctgtgtgtt

SEQ ID NO: 61422 - DNA, 20 bp, Artificial Sequence
  chemically synthesized
tctgtcgctctgttggtcat

SEQ ID NO: 61423 - DNA, 20 bp, Artificial Sequence
  chemically synthesized
ctctgtcgctctgttggtca

SEQ ID NO: 61424 - DNA, 20 bp, Artificial Sequence
  chemically synthesized
tctctgtcgctctgttggtc

SEQ ID NO: 61425 - DNA, 20 bp, Artificial Sequence
  chemically synthesized
ttctctgtcgctctgttggt

SEQ ID NO: 61426 - DNA, 20 bp, Artificial Sequence
  chemically synthesized
tttctctgtcgctctgttgg

SEQ ID NO: 61427 - DNA, 20 bp, Artificial Sequence
  chemically synthesized
agttttttctctgtcgctct

SEQ ID NO: 61428 - DNA, 20 bp, Artificial Sequence
  chemically synthesized
gagttttttctctgtcgctc

SEQ ID NO: 61429 - DNA, 20 bp, Artificial Sequence
  chemically synthesized
tgagttttttctctgtcgct

SEQ ID NO: 61430 - DNA, 20 bp, Artificial Sequence
  chemically synthesized
ctaaccatcagcattttgag

SEQ ID NO: 61431 - DNA, 20 bp, Artificial Sequence
  chemically synthesized
caggggagatggatcctatc

SEQ ID NO: 61432 - DNA, 20 bp, Artificial Sequence
  chemically synthesized
ccaggggagatggatcctat

SEQ ID NO: 61433 - DNA, 20 bp, Artificial Sequence
  chemically synthesized
ctttccaggggagatggatc

SEQ ID NO: 61434 - DNA, 20 bp, Artificial Sequence
  chemically synthesized
ttgctttccaggggagatgg

SEQ ID NO: 61435 - DNA, 20 bp, Artificial Sequence
  chemically synthesized
ctaagtaaatgcaaagcacc

SEQ ID NO: 61436 - DNA, 20 bp, Artificial Sequence
  chemically synthesized
aggaaataataagtgggccc

SEQ ID NO: 61437 - DNA, 20 bp, Artificial Sequence
  chemically synthesized
caggaaataataagtgggcc

SEQ ID NO: 61438 - DNA, 20 bp, Artificial Sequence
  chemically synthesized
actgaaaagcaactttcagg

SEQ ID NO: 61439 - DNA, 20 bp, Artificial Sequence
  chemically synthesized
aaccaaaatccctccataaa

SEQ ID NO: 61440 - DNA, 20 bp, Artificial Sequence
  chemically synthesized
aaaccaaaatccctccataa

SEQ ID NO: 61441 - DNA, 20 bp, Artificial Sequence
  chemically synthesized
taaaccaaaatccctccata

SEQ ID NO: 61442 - DNA, 20 bp, Artificial Sequence
  chemically synthesized
aagtggcagatgctctgggc

SEQ ID NO: 61443 - DNA, 20 bp, Artificial Sequence
  chemically synthesized
caagtggcagatgctctggg

SEQ ID NO: 61444 - DNA, 20 bp, Artificial Sequence
  chemically synthesized
catttcaagtggcagatgct

SEQ ID NO: 61445 - DNA, 20 bp, Artificial Sequence
  chemically synthesized
acatttcaagtggcagatgc

SEQ ID NO: 61446 - DNA, 20 bp, Artificial Sequence
  chemically synthesized
atgctagatcacgtttacat

SEQ ID NO: 61447 - DNA, 20 bp, Artificial Sequence
  chemically synthesized
gatgctagatcacgtttaca

SEQ ID NO: 61448 - DNA, 20 bp, Artificial Sequence
  chemically synthesized
gtacctttgatgctagatca

SEQ ID NO: 61449 - DNA, 20 bp, Artificial Sequence
  chemically synthesized
gtagaaagtcaagaagggaa

SEQ ID NO: 61450 - DNA, 20 bp, Artificial Sequence
  chemically synthesized
cttggtagaaagtcaagaag

SEQ ID NO: 61451 - DNA, 20 bp, Artificial Sequence
  chemically synthesized
ccttggtagaaagtcaagaa

SEQ ID NO: 61452 - DNA, 20 bp, Artificial Sequence
  chemically synthesized
tccttggtagaaagtcaaga

SEQ ID NO: 61453 - DNA, 20 bp, Artificial Sequence
  chemically synthesized
ttttccttggtagaaagtca

SEQ ID NO: 61454 - DNA, 20 bp, Artificial Sequence
  chemically synthesized
caacaggggtgaacatccct

SEQ ID NO: 61455 - DNA, 20 bp, Artificial Sequence
  chemically synthesized
gcaacaggggtgaacatccc

SEQ ID NO: 61456 - DNA, 20 bp, Artificial Sequence
  chemically synthesized
ggactggaactgagaatgtg

SEQ ID NO: 61457 - DNA, 20 bp, Artificial Sequence
  chemically synthesized
gggactggaactgagaatgt

SEQ ID NO: 61458 - DNA, 20 bp, Artificial Sequence
  chemically synthesized
cagaaggatgaagatgtctt

SEQ ID NO: 61459 - DNA, 20 bp, Artificial Sequence
  chemically synthesized
ccagaaggatgaagatgtct

SEQ ID NO: 61460 - DNA, 20 bp, Artificial Sequence
  chemically synthesized
tccagaaggatgaagatgtc

SEQ ID NO: 61461 - DNA, 20 bp, Artificial Sequence
  chemically synthesized
gtgtcaggtatgcaggcaag

SEQ ID NO: 61462 - DNA, 20 bp, Artificial Sequence
  chemically synthesized
ttggtgtcaggtatgcaggc

SEQ ID NO: 61463 - DNA, 20 bp, Artificial Sequence
  chemically synthesized
attggtgtcaggtatgcagg

SEQ ID NO: 61464 - DNA, 20 bp, Artificial Sequence
  chemically synthesized
agaagcacctttattggtgt

SEQ ID NO: 61465 - DNA, 20 bp, Artificial Sequence
  chemically synthesized
aagaagcacctttattggtg

SEQ ID NO: 61466 - DNA, 20 bp, Artificial Sequence
  chemically synthesized
gcctgggaccccaatggctg

SEQ ID NO: 61467 - DNA, 20 bp, Artificial Sequence
  chemically synthesized
agcctgggaccccaatggct

SEQ ID NO: 61468 - DNA, 20 bp, Artificial Sequence
  chemically synthesized
accaatttagcctgggaccc

SEQ ID NO: 61469 - DNA, 20 bp, Artificial Sequence
  chemically synthesized
aacaaaatccccacccacta

SEQ ID NO: 61470 - DNA, 20 bp, Artificial Sequence
  chemically synthesized
gaacaaaatccccacccact

SEQ ID NO: 61471 - DNA, 20 bp, Artificial Sequence
  chemically synthesized
tgaacaaaatccccacccac

SEQ ID NO: 61472 - DNA, 20 bp, Artificial Sequence
  chemically synthesized
ctggaagctgccatacattt

SEQ ID NO: 61473 - DNA, 20 bp, Artificial Sequence
  chemically synthesized
gtacaagccatctgtattcc

SEQ ID NO: 61474 - DNA, 20 bp, Artificial Sequence
  chemically synthesized
gctgagaattagtacaagcc

SEQ ID NO: 61475 - DNA, 20 bp, Artificial Sequence
  chemically synthesized
ttagctgagaattagtacaa

SEQ ID NO: 61476 - DNA, 20 bp, Artificial Sequence
  chemically synthesized
tgaagaacaaggaagcagag

SEQ ID NO: 61477 - DNA, 20 bp, Artificial Sequence
  chemically synthesized
gtgaagaacaaggaagcaga

SEQ ID NO: 61478 - DNA, 20 bp, Artificial Sequence
  chemically synthesized
tgtgaagaacaaggaagcag

SEQ ID NO: 61479 - DNA, 20 bp, Artificial Sequence
  chemically synthesized
cgccttttgtgaagaacaag

SEQ ID NO: 61480 - DNA, 20 bp, Artificial Sequence
  chemically synthesized
gcgccttttgtgaagaacaa

SEQ ID NO: 61481 - DNA, 20 bp, Artificial Sequence
  chemically synthesized
cctgctgtctttgcgccttt

SEQ ID NO: 61482 - DNA, 20 bp, Artificial Sequence
  chemically synthesized
gagaatgacttgcctgctgt

SEQ ID NO: 61483 - DNA, 20 bp, Artificial Sequence
  chemically synthesized
ggagaatgacttgcctgctg

SEQ ID NO: 61484 - DNA, 20 bp, Artificial Sequence
  chemically synthesized
tttggagaatgacttgcctg

SEQ ID NO: 61485 - DNA, 20 bp, Artificial Sequence
  chemically synthesized
ctttggagaatgacttgcct

SEQ ID NO: 61486 - DNA, 20 bp, Artificial Sequence
  chemically synthesized
cactttctttggagaatgac

SEQ ID NO: 61487 - DNA, 20 bp, Artificial Sequence
  chemically synthesized
gagggcactcttacactttc

SEQ ID NO: 61488 - DNA, 20 bp, Artificial Sequence
  chemically synthesized
aaactaacctgcaaaatagg

SEQ ID NO: 61489 - DNA, 20 bp, Artificial Sequence
  chemically synthesized
ttgaaactaacctgcaaaat

SEQ ID NO: 61490 - DNA, 20 bp, Artificial Sequence
  chemically synthesized
catgtcaaagtgtgggagca

SEQ ID NO: 61491 - DNA, 20 bp, Artificial Sequence
  chemically synthesized
gcatgtcaaagtgtgggagc

SEQ ID NO: 61492 - DNA, 20 bp, Artificial Sequence
  chemically synthesized
cctcagagtgctttgcatgt

SEQ ID NO: 61493 - DNA, 20 bp, Artificial Sequence
  chemically synthesized
ttccctcagagtgctttgca

SEQ ID NO: 61494 - DNA, 20 bp, Artificial Sequence
  chemically synthesized
gttccctcagagtgctttgc

SEQ ID NO: 61495 - DNA, 20 bp, Artificial Sequence
  chemically synthesized
tgttccctcagagtgctttg

SEQ ID NO: 61496 - DNA, 20 bp, Artificial Sequence
  chemically synthesized
ttgttccctcagagtgcttt

SEQ ID NO: 61497 - DNA, 20 bp, Artificial Sequence
  chemically synthesized
agaactccagagatcaataa

SEQ ID NO: 61498 - DNA, 20 bp, Artificial Sequence
  chemically synthesized
cttcagaactccagagatca

SEQ ID NO: 61499 - DNA, 20 bp, Artificial Sequence
  chemically synthesized
ttacttcagaactccagaga

SEQ ID NO: 61500 - DNA, 20 bp, Artificial Sequence
  chemically synthesized
tggagtgaatggagtccaag

SEQ ID NO: 61501 - DNA, 20 bp, Artificial Sequence
  chemically synthesized
aaggcttctggagtgaatgg

SEQ ID NO: 61502 - DNA, 20 bp, Artificial Sequence
  chemically synthesized
aaaggcttctggagtgaatg

SEQ ID NO: 61503 - DNA, 20 bp, Artificial Sequence
  chemically synthesized
taaaggcttctggagtgaat

SEQ ID NO: 61504 - DNA, 20 bp, Artificial Sequence
  chemically synthesized
gatccatccctgatcactat

SEQ ID NO: 61505 - DNA, 20 bp, Artificial Sequence
  chemically synthesized
aagttcgatccatccctgat

SEQ ID NO: 61506 - DNA, 20 bp, Artificial Sequence
  chemically synthesized
tccagcacaaagctgacact

SEQ ID NO: 61507 - DNA, 20 bp, Artificial Sequence
  chemically synthesized
atccagcacaaagctgacac

SEQ ID NO: 61508 - DNA, 20 bp, Artificial Sequence
  chemically synthesized
ccatcctaagaatgtaactg

SEQ ID NO: 61509 - DNA, 20 bp, Artificial Sequence
  chemically synthesized
cccatcctaagaatgtaact

SEQ ID NO: 61510 - DNA, 20 bp, Artificial Sequence
  chemically synthesized
tcccatcctaagaatgtaac

SEQ ID NO: 61511 - DNA, 20 bp, Artificial Sequence
  chemically synthesized
ggcaacacctcttttcccat

SEQ ID NO: 61512 - DNA, 20 bp, Artificial Sequence
  chemically synthesized
aggcaacacctcttttccca

SEQ ID NO: 61513 - DNA, 20 bp, Artificial Sequence
  chemically synthesized
ggagatttaggcaacacctc

SEQ ID NO: 61514 - DNA, 20 bp, Artificial Sequence
  chemically synthesized
gggagatttaggcaacacct

SEQ ID NO: 61515 - DNA, 20 bp, Artificial Sequence
  chemically synthesized
aaatgatttgggagatttag

SEQ ID NO: 61516 - DNA, 20 bp, Artificial Sequence
  chemically synthesized
tgggactaaaggaatcccaa

SEQ ID NO: 61517 - DNA, 20 bp, Artificial Sequence
  chemically synthesized
agagaatgcttatgggacta

SEQ ID NO: 61518 - DNA, 20 bp, Artificial Sequence
  chemically synthesized
taacaaatacgagacaactt

SEQ ID NO: 61519 - DNA, 20 bp, Artificial Sequence
  chemically synthesized
ttctaacaaatacgagacaa

SEQ ID NO: 61520 - DNA, 20 bp, Artificial Sequence
  chemically synthesized
cgtatcagagctccttattc

SEQ ID NO: 61521 - DNA, 20 bp, Artificial Sequence
  chemically synthesized
acgtatcagagctccttatt

SEQ ID NO: 61522 - DNA, 20 bp, Artificial Sequence
  chemically synthesized
actcctttacgtatcagagc

SEQ ID NO: 61523 - DNA, 20 bp, Artificial Sequence
  chemically synthesized
ctgttgactcctttacgtat

SEQ ID NO: 61524 - DNA, 20 bp, Artificial Sequence
  chemically synthesized
gctgttgactcctttacgta

SEQ ID NO: 61525 - DNA, 20 bp, Artificial Sequence
  chemically synthesized
tgctgttgactcctttacgt

SEQ ID NO: 61526 - DNA, 20 bp, Artificial Sequence
  chemically synthesized
tgtccctaattttgctgttg

SEQ ID NO: 61527 - DNA, 20 bp, Artificial Sequence
  chemically synthesized
taagctcagattctgtccct

SEQ ID NO: 61528 - DNA, 20 bp, Artificial Sequence
  chemically synthesized
ataagctcagattctgtccc

SEQ ID NO: 61529 - DNA, 20 bp, Artificial Sequence
  chemically synthesized
accactcacaacatccttta

SEQ ID NO: 61530 - DNA, 20 bp, Artificial Sequence
  chemically synthesized
actctcctccttgaccactc

SEQ ID NO: 61531 - DNA, 20 bp, Artificial Sequence
  chemically synthesized
cactctcctccttgaccact

SEQ ID NO: 61532 - DNA, 20 bp, Artificial Sequence
  chemically synthesized
aagtgtggaaagggagatcc

SEQ ID NO: 61533 - DNA, 20 bp, Artificial Sequence
  chemically synthesized
atatgtgaaaggatagagag

SEQ ID NO: 61534 - DNA, 20 bp, Artificial Sequence
  chemically synthesized
atctccccttaatatgtgaa

SEQ ID NO: 61535 - DNA, 20 bp, Artificial Sequence
  chemically synthesized
catctccccttaatatgtga

SEQ ID NO: 61536 - DNA, 20 bp, Artificial Sequence
  chemically synthesized
ctgctcactaacctaaccta

SEQ ID NO: 61537 - DNA, 20 bp, Artificial Sequence
  chemically synthesized
tggagagaaatgattcctgc

SEQ ID NO: 61538 - DNA, 20 bp, Artificial Sequence
  chemically synthesized
ctggagagaaatgattcctg

SEQ ID NO: 61539 - DNA, 20 bp, Artificial Sequence
  chemically synthesized
acaatgtaaaatggcgtctt

SEQ ID NO: 61540 - DNA, 20 bp, Artificial Sequence
  chemically synthesized
tcactattcacaatgtaaaa

SEQ ID NO: 61541 - DNA, 20 bp, Artificial Sequence
  chemically synthesized
atcactattcacaatgtaaa

SEQ ID NO: 61542 - DNA, 20 bp, Artificial Sequence
  chemically synthesized
tctctttatcactattcaca

SEQ ID NO: 61543 - DNA, 20 bp, Artificial Sequence
  chemically synthesized
gtctctttatcactattcac

SEQ ID NO: 61544 - DNA, 20 bp, Artificial Sequence
  chemically synthesized
tgtctctttatcactattca

SEQ ID NO: 61545 - DNA, 20 bp, Artificial Sequence
  chemically synthesized
aagataatacactgtgtggt

SEQ ID NO: 61546 - DNA, 20 bp, Artificial Sequence
  chemically synthesized
atcttaaagataatacactg

SEQ ID NO: 61547 - DNA, 20 bp, Artificial Sequence
  chemically synthesized
aatcttaaagataatacact

SEQ ID NO: 61548 - DNA, 20 bp, Artificial Sequence
  chemically synthesized
taatcttaaagataatacac

SEQ ID NO: 61549 - DNA, 20 bp, Artificial Sequence
  chemically synthesized
ttaatcttaaagataataca

SEQ ID NO: 61550 - DNA, 20 bp, Artificial Sequence
  chemically synthesized
tttaatcttaaagataatac

SEQ ID NO: 61551 - DNA, 20 bp, Artificial Sequence
  chemically synthesized
ttttaatcttaaagataata

SEQ ID NO: 61552 - DNA, 20 bp, Artificial Sequence
  chemically synthesized
tttttaatcttaaagataat

SEQ ID NO: 61553 - DNA, 20 bp, Artificial Sequence
  chemically synthesized
ttttttaatcttaaagataa

SEQ ID NO: 61554 - DNA, 20 bp, Artificial Sequence
  chemically synthesized
atagagtggtttttttttaa

SEQ ID NO: 61555 - DNA, 20 bp, Artificial Sequence
  chemically synthesized
tctgtcaaattgatagagtg

SEQ ID NO: 61556 - DNA, 20 bp, Artificial Sequence
  chemically synthesized
atctgtcaaattgatagagt

SEQ ID NO: 61557 - DNA, 20 bp, Artificial Sequence
  chemically synthesized
tatctgtcaaattgatagag

SEQ ID NO: 61558 - DNA, 20 bp, Artificial Sequence
  chemically synthesized
ttatctgtcaaattgataga

SEQ ID NO: 61559 - DNA, 20 bp, Artificial Sequence
  chemically synthesized
tttttatctgtcaaattgat

SEQ ID NO: 61560 - DNA, 20 bp, Artificial Sequence
  chemically synthesized
tcaaataaatacagatataa

SEQ ID NO: 61561 - DNA, 20 bp, Artificial Sequence
  chemically synthesized
aataaatatatgaaaatgaa

SEQ ID NO: 61562 - DNA, 20 bp, Artificial Sequence
  chemically synthesized
ggaaaaatctcataaagtat

SEQ ID NO: 61563 - DNA, 20 bp, Artificial Sequence
  chemically synthesized
aaaaaacaaatatcacaata

SEQ ID NO: 61564 - DNA, 20 bp, Artificial Sequence
  chemically synthesized
taaatcattaaaaaaacaaa

SEQ ID NO: 61565 - DNA, 20 bp, Artificial Sequence
  chemically synthesized
atagataaaggactcttata

SEQ ID NO: 61566 - DNA, 20 bp, Artificial Sequence
  chemically synthesized
gtatcattaatagataaagg

SEQ ID NO: 61567 - DNA, 20 bp, Artificial Sequence
  chemically synthesized
ccacataaacagctgataga

SEQ ID NO: 61568 - DNA, 20 bp, Artificial Sequence
  chemically synthesized
aattgccacataaacagctg

SEQ ID NO: 61569 - DNA, 20 bp, Artificial Sequence
  chemically synthesized
aaagtaagcttaaattgcca

SEQ ID NO: 61570 - DNA, 20 bp, Artificial Sequence
  chemically synthesized
aaaagtaagcttaaattgcc

SEQ ID NO: 61571 - DNA, 20 bp, Artificial Sequence
  chemically synthesized
tatatgtcaacacacacaat

SEQ ID NO: 61572 - DNA, 20 bp, Artificial Sequence
  chemically synthesized
atatatgtcaacacacacaa

SEQ ID NO: 61573 - DNA, 20 bp, Artificial Sequence
  chemically synthesized
agacatgcaactacataaaa

SEQ ID NO: 61574 - DNA, 20 bp, Artificial Sequence
  chemically synthesized
taagcatcaaagctgtagaa

SEQ ID NO: 61575 - DNA, 20 bp, Artificial Sequence
  chemically synthesized
acatgaagaagaacattcta

SEQ ID NO: 61576 - DNA, 20 bp, Artificial Sequence
  chemically synthesized
cataatcttgacatgaagaa

SEQ ID NO: 61577 - DNA, 20 bp, Artificial Sequence
  chemically synthesized
acataatcttgacatgaaga

SEQ ID NO: 61578 - DNA, 20 bp, Artificial Sequence
  chemically synthesized
tagccaaatgtttacataat

SEQ ID NO: 61579 - DNA, 20 bp, Artificial Sequence
  chemically synthesized
gaaaaattatagccaaatgt

SEQ ID NO: 61580 - DNA, 20 bp, Artificial Sequence
  chemically synthesized
tataaaagtgaaactctaaa

SEQ ID NO: 61581 - DNA, 20 bp, Artificial Sequence
  chemically synthesized
aggaaattatataaaagtga

SEQ ID NO: 61582 - DNA, 20 bp, Artificial Sequence
  chemically synthesized
aaggaaattatataaaagtg

SEQ ID NO: 61583 - DNA, 20 bp, Artificial Sequence
  chemically synthesized
atataacaacaacaaaatac

SEQ ID NO: 61584 - DNA, 20 bp, Artificial Sequence
  chemically synthesized
aactaaatgcctagccacct

SEQ ID NO: 61585 - DNA, 20 bp, Artificial Sequence
  chemically synthesized
aaaaaaattaaactaaatgc

SEQ ID NO: 61586 - DNA, 20 bp, Artificial Sequence
  chemically synthesized
attaaaaaaaattaaactaa

SEQ ID NO: 61587 - DNA, 20 bp, Artificial Sequence
  chemically synthesized
aattaaaaaaaattaaacta

SEQ ID NO: 61588 - DNA, 20 bp, Artificial Sequence
  chemically synthesized
taattaaaaaaaattaaact

SEQ ID NO: 61589 - DNA, 20 bp, Artificial Sequence
  chemically synthesized
ttttaattaaaaaaaattaa

SEQ ID NO: 61590 - DNA, 20 bp, Artificial Sequence
  chemically synthesized
caggcataagccaacacgcc

SEQ ID NO: 61591 - DNA, 20 bp, Artificial Sequence
  chemically synthesized
aactcctcacctcaggtgat

SEQ ID NO: 61592 - DNA, 20 bp, Artificial Sequence
  chemically synthesized
gccaggctggtcttgaactc

SEQ ID NO: 61593 - DNA, 20 bp, Artificial Sequence
  chemically synthesized
accatgttggccaggctggt

SEQ ID NO: 61594 - DNA, 20 bp, Artificial Sequence
  chemically synthesized
caccatgttggccaggctgg

SEQ ID NO: 61595 - DNA, 20 bp, Artificial Sequence
  chemically synthesized
tagagctggggtttcaccat

SEQ ID NO: 61596 - DNA, 20 bp, Artificial Sequence
  chemically synthesized
gtagagctggggtttcacca

SEQ ID NO: 61597 - DNA, 20 bp, Artificial Sequence
  chemically synthesized
tgtagagctggggtttcacc

SEQ ID NO: 61598 - DNA, 20 bp, Artificial Sequence
  chemically synthesized
ttgtagagctggggtttcac

SEQ ID NO: 61599 - DNA, 20 bp, Artificial Sequence
  chemically synthesized
tatttttgtagagctggggt

SEQ ID NO: 61600 - DNA, 20 bp, Artificial Sequence
  chemically synthesized
gtatttttgtagagctgggg

SEQ ID NO: 61601 - DNA, 20 bp, Artificial Sequence
  chemically synthesized
tgtatttttgtagagctggg

SEQ ID NO: 61602 - DNA, 20 bp, Artificial Sequence
  chemically synthesized
ttgtatttttgtagagctgg

SEQ ID NO: 61603 - DNA, 20 bp, Artificial Sequence
  chemically synthesized
caggcacccgccatcatgcc

SEQ ID NO: 61604 - DNA, 20 bp, Artificial Sequence
  chemically synthesized
tcccatctcagcctcccaag

SEQ ID NO: 61605 - DNA, 20 bp, Artificial Sequence
  chemically synthesized
aagcaattctcccatctcag

SEQ ID NO: 61606 - DNA, 20 bp, Artificial Sequence
  chemically synthesized
gctcactgcaacctccgcct

SEQ ID NO: 61607 - DNA, 20 bp, Artificial Sequence
  chemically synthesized
gagtgcaatggcgccatctt

SEQ ID NO: 61608 - DNA, 20 bp, Artificial Sequence
  chemically synthesized
ctcagtcatccaggttggag

SEQ ID NO: 61609 - DNA, 20 bp, Artificial Sequence
  chemically synthesized
agatggagtcttgctcagtc

SEQ ID NO: 61610 - DNA, 20 bp, Artificial Sequence
  chemically synthesized
gagatggagtcttgctcagt

SEQ ID NO: 61611 - DNA, 20 bp, Artificial Sequence
  chemically synthesized
tgagatggagtcttgctcag

SEQ ID NO: 61612 - DNA, 20 bp, Artificial Sequence
  chemically synthesized
ttgagatggagtcttgctca

SEQ ID NO: 61613 - DNA, 20 bp, Artificial Sequence
  chemically synthesized
tttgagatggagtcttgctc

SEQ ID NO: 61614 - DNA, 20 bp, Artificial Sequence
  chemically synthesized
ttttgagatggagtcttgct

SEQ ID NO: 61615 - DNA, 20 bp, Artificial Sequence
  chemically synthesized
aataaatacatgaatttttt

SEQ ID NO: 61616 - DNA, 20 bp, Artificial Sequence
  chemically synthesized
actaaaaagaaaaatagata

SEQ ID NO: 61617 - DNA, 20 bp, Artificial Sequence
  chemically synthesized
gttaactaaaaagaaaaata

SEQ ID NO: 61618 - DNA, 20 bp, Artificial Sequence
  chemically synthesized
tgaataaatgctgccaggac

SEQ ID NO: 61619 - DNA, 20 bp, Artificial Sequence
  chemically synthesized
gtggagaaaggaaggattat

SEQ ID NO: 61620 - DNA, 20 bp, Artificial Sequence
  chemically synthesized
aaaagcaacttagtggagaa

SEQ ID NO: 61621 - DNA, 20 bp, Artificial Sequence
  chemically synthesized
caccaattgaaaagcaactt

SEQ ID NO: 61622 - DNA, 20 bp, Artificial Sequence
  chemically synthesized
atctgaaaattgcaccaatt

SEQ ID NO: 61623 - DNA, 20 bp, Artificial Sequence
  chemically synthesized
ttcatctgaaaattgcacca

SEQ ID NO: 61624 - DNA, 20 bp, Artificial Sequence
  chemically synthesized
attattcatctgaaaattgc

SEQ ID NO: 61625 - DNA, 20 bp, Artificial Sequence
  chemically synthesized
cattattcatctgaaaattg

SEQ ID NO: 61626 - DNA, 20 bp, Artificial Sequence
  chemically synthesized
atcctgccatctttcattat

SEQ ID NO: 61627 - DNA, 20 bp, Artificial Sequence
  chemically synthesized
tactcacccaccccaccctt

SEQ ID NO: 61628 - DNA, 20 bp, Artificial Sequence
  chemically synthesized
cataaatgtaacaactgccc

SEQ ID NO: 61629 - DNA, 20 bp, Artificial Sequence
  chemically synthesized
cagtgtgatgcaagatgcca

SEQ ID NO: 61630 - DNA, 20 bp, Artificial Sequence
  chemically synthesized
gcagtgtgatgcaagatgcc

SEQ ID NO: 61631 - DNA, 20 bp, Artificial Sequence
  chemically synthesized
tttgcagtgtgatgcaagat

SEQ ID NO: 61632 - DNA, 20 bp, Artificial Sequence
  chemically synthesized
gtttgcagtgtgatgcaaga

SEQ ID NO: 61633 - DNA, 20 bp, Artificial Sequence
  chemically synthesized
tttgtttgcagtgtgatgca

SEQ ID NO: 61634 - DNA, 20 bp, Artificial Sequence
  chemically synthesized
gccttgtttgtttgcagtgt

SEQ ID NO: 61635 - DNA, 20 bp, Artificial Sequence
  chemically synthesized
aggccaagattggccttgtt

SEQ ID NO: 61636 - DNA, 20 bp, Artificial Sequence
  chemically synthesized
caggccaagattggccttgt

SEQ ID NO: 61637 - DNA, 20 bp, Artificial Sequence
  chemically synthesized
tcaggccaagattggccttg

SEQ ID NO: 61638 - DNA, 20 bp, Artificial Sequence
  chemically synthesized
ttcaggccaagattggcctt

SEQ ID NO: 61639 - DNA, 20 bp, Artificial Sequence
  chemically synthesized
tttcaggccaagattggcct

SEQ ID NO: 61640 - DNA, 20 bp, Artificial Sequence
  chemically synthesized
ctgtcctgttttttcaggcc

SEQ ID NO: 61641 - DNA, 20 bp, Artificial Sequence
  chemically synthesized
ttgctgtcctgttttttcag

SEQ ID NO: 61642 - DNA, 20 bp, Artificial Sequence
  chemically synthesized
ttcttgctgtcctgtttttt

SEQ ID NO: 61643 - DNA, 20 bp, Artificial Sequence
  chemically synthesized
ttattcttgctgtcctgttt

SEQ ID NO: 61644 - DNA, 20 bp, Artificial Sequence
  chemically synthesized
ctcaagtccttcttattctt

SEQ ID NO: 61645 - DNA, 20 bp, Artificial Sequence
  chemically synthesized
tcttcctcaagtccttctta

SEQ ID NO: 61646 - DNA, 20 bp, Artificial Sequence
  chemically synthesized
ctcttcctcaagtccttctt

SEQ ID NO: 61647 - DNA, 20 bp, Artificial Sequence
  chemically synthesized
tgcacctcagagatgaagaa

SEQ ID NO: 61648 - DNA, 20 bp, Artificial Sequence
  chemically synthesized
ctgcacctcagagatgaaga

SEQ ID NO: 61649 - DNA, 20 bp, Artificial Sequence
  chemically synthesized
tttctgcacctcagagatga

SEQ ID NO: 61650 - DNA, 20 bp, Artificial Sequence
  chemically synthesized
tgttctttctgcacctcaga

SEQ ID NO: 61651 - DNA, 20 bp, Artificial Sequence
  chemically synthesized
acccaccaacctaacttctg

SEQ ID NO: 61652 - DNA, 20 bp, Artificial Sequence
  chemically synthesized
tcttaacccaccaacctaac

SEQ ID NO: 61653 - DNA, 20 bp, Artificial Sequence
  chemically synthesized
ctcttaacccaccaacctaa

SEQ ID NO: 61654 - DNA, 20 bp, Artificial Sequence
  chemically synthesized
tgagatttctcttaacccac

SEQ ID NO: 61655 - DNA, 20 bp, Artificial Sequence
  chemically synthesized
gggaggaggtggcagaagag

SEQ ID NO: 61656 - DNA, 20 bp, Artificial Sequence
  chemically synthesized
ggggaggaggtggcagaaga

SEQ ID NO: 61657 - DNA, 20 bp, Artificial Sequence
  chemically synthesized
tggggaggaggtggcagaag

SEQ ID NO: 61658 - DNA, 20 bp, Artificial Sequence
  chemically synthesized
ttttggggaggaggtggcag

SEQ ID NO: 61659 - DNA, 20 bp, Artificial Sequence
  chemically synthesized
attttggggaggaggtggca

SEQ ID NO: 61660 - DNA, 20 bp, Artificial Sequence
  chemically synthesized
gcagtccctgaaatttattt

SEQ ID NO: 61661 - DNA, 20 bp, Artificial Sequence
  chemically synthesized
ggcagtccctgaaatttatt

SEQ ID NO: 61662 - DNA, 20 bp, Artificial Sequence
  chemically synthesized
gaatgatttggcagtccctg

SEQ ID NO: 61663 - DNA, 20 bp, Artificial Sequence
  chemically synthesized
aggttggaatgatttggcag

SEQ ID NO: 61664 - DNA, 20 bp, Artificial Sequence
  chemically synthesized
ttgaggttggaatgatttgg

SEQ ID NO: 61665 - DNA, 20 bp, Artificial Sequence
  chemically synthesized
gttgaggttggaatgatttg

SEQ ID NO: 61666 - DNA, 20 bp, Artificial Sequence
  chemically synthesized
atgatttgttgaggttggaa

SEQ ID NO: 61667 - DNA, 20 bp, Artificial Sequence
  chemically synthesized
gatgctctcttcatgatttg

SEQ ID NO: 61668 - DNA, 20 bp, Artificial Sequence
  chemically synthesized
cttagatgctctcttcatga

SEQ ID NO: 61669 - DNA, 20 bp, Artificial Sequence
  chemically synthesized
ataatcaggagagttactta

SEQ ID NO: 61670 - DNA, 20 bp, Artificial Sequence
  chemically synthesized
cccttcataatcaggagagt

SEQ ID NO: 61671 - DNA, 20 bp, Artificial Sequence
  chemically synthesized
acccttcataatcaggagag

SEQ ID NO: 61672 - DNA, 20 bp, Artificial Sequence
  chemically synthesized
tacccttcataatcaggaga

SEQ ID NO: 61673 - DNA, 20 bp, Artificial Sequence
  chemically synthesized
ttacccttcataatcaggag

SEQ ID NO: 61674 - DNA, 20 bp, Artificial Sequence
  chemically synthesized
atttttacccttcataatca

SEQ ID NO: 61675 - DNA, 20 bp, Artificial Sequence
  chemically synthesized
aagtaacagcttaattttta

SEQ ID NO: 61676 - DNA, 20 bp, Artificial Sequence
  chemically synthesized
gaagtaacagcttaattttt

SEQ ID NO: 61677 - DNA, 20 bp, Artificial Sequence
  chemically synthesized
tgaagtaacagcttaatttt

SEQ ID NO: 61678 - DNA, 20 bp, Artificial Sequence
  chemically synthesized
ttgaagtaacagcttaattt

SEQ ID NO: 61679 - DNA, 20 bp, Artificial Sequence
  chemically synthesized
tttttgaagtaacagcttaa

SEQ ID NO: 61680 - DNA, 20 bp, Artificial Sequence
  chemically synthesized
gtttttgaagtaacagctta

SEQ ID NO: 61681 - DNA, 20 bp, Artificial Sequence
  chemically synthesized
aagcccaaggtctttgtttt

SEQ ID NO: 61682 - DNA, 20 bp, Artificial Sequence
  chemically synthesized
aaagcccaaggtctttgttt

SEQ ID NO: 61683 - DNA, 20 bp, Artificial Sequence
  chemically synthesized
taaagcccaaggtctttgtt

SEQ ID NO: 61684 - DNA, 20 bp, Artificial Sequence
  chemically synthesized
ttttaaagcccaaggtcttt

SEQ ID NO: 61685 - DNA, 20 bp, Artificial Sequence
  chemically synthesized
attttaaagcccaaggtctt

SEQ ID NO: 61686 - DNA, 20 bp, Artificial Sequence
  chemically synthesized
tattttaaagcccaaggtct

SEQ ID NO: 61687 - DNA, 20 bp, Artificial Sequence
  chemically synthesized
ttattttaaagcccaaggtc

SEQ ID NO: 61688 - DNA, 20 bp, Artificial Sequence
  chemically synthesized
tttttattttaaagcccaag

SEQ ID NO: 61689 - DNA, 20 bp, Artificial Sequence
  chemically synthesized
gtttttattttaaagcccaa

SEQ ID NO: 61690 - DNA, 20 bp, Artificial Sequence
  chemically synthesized
tgtttttattttaaagccca

SEQ ID NO: 61691 - DNA, 20 bp, Artificial Sequence
  chemically synthesized
ttttgtttttattttaaagc

SEQ ID NO: 61692 - DNA, 20 bp, Artificial Sequence
  chemically synthesized
gttttgtttttattttaaag

SEQ ID NO: 61693 - DNA, 20 bp, Artificial Sequence
  chemically synthesized
cctttgttttgtttttattt

SEQ ID NO: 61694 - DNA, 20 bp, Artificial Sequence
  chemically synthesized
gcctttgttttgtttttatt

SEQ ID NO: 61695 - DNA, 20 bp, Artificial Sequence
  chemically synthesized
atgggaccagcatgaggtaa

SEQ ID NO: 61696 - DNA, 20 bp, Artificial Sequence
  chemically synthesized
tgagattcatgggaccagca

SEQ ID NO: 61697 - DNA, 20 bp, Artificial Sequence
  chemically synthesized
tggcttatgagattcatggg

SEQ ID NO: 61698 - DNA, 20 bp, Artificial Sequence
  chemically synthesized
tgatcaccaagtcgtagcca

SEQ ID NO: 61699 - DNA, 20 bp, Artificial Sequence
  chemically synthesized
ataggcaaatcaggcaaaat

SEQ ID NO: 61700 - DNA, 20 bp, Artificial Sequence
  chemically synthesized
cataggcaaatcaggcaaaa

SEQ ID NO: 61701 - DNA, 20 bp, Artificial Sequence
  chemically synthesized
aggggcctcaaaaagtgtca

SEQ ID NO: 61702 - DNA, 20 bp, Artificial Sequence
  chemically synthesized
atcctctgtattcaggggcc

SEQ ID NO: 61703 - DNA, 20 bp, Artificial Sequence
  chemically synthesized
aggccaaattaatcctctgt

SEQ ID NO: 61704 - DNA, 20 bp, Artificial Sequence
  chemically synthesized
gataacaatatagattgagg

SEQ ID NO: 61705 - DNA, 20 bp, Artificial Sequence
  chemically synthesized
gtgagttggataacaatata

SEQ ID NO: 61706 - DNA, 20 bp, Artificial Sequence
  chemically synthesized
tacattagtgagttggataa

SEQ ID NO: 61707 - DNA, 20 bp, Artificial Sequence
  chemically synthesized
ctacattagtgagttggata

SEQ ID NO: 61708 - DNA, 20 bp, Artificial Sequence
  chemically synthesized
agaatgtttctacattagtg

SEQ ID NO: 61709 - DNA, 20 bp, Artificial Sequence
  chemically synthesized
gtcttcagaatgtttctaca

SEQ ID NO: 61710 - DNA, 20 bp, Artificial Sequence
  chemically synthesized
ggtcttcagaatgtttctac

SEQ ID NO: 61711 - DNA, 20 bp, Artificial Sequence
  chemically synthesized
tggtcttcagaatgtttcta

SEQ ID NO: 61712 - DNA, 20 bp, Artificial Sequence
  chemically synthesized
tgctctaattttggtcttca

SEQ ID NO: 61713 - DNA, 20 bp, Artificial Sequence
  chemically synthesized
ttctgctctaattttggtct

SEQ ID NO: 61714 - DNA, 20 bp, Artificial Sequence
  chemically synthesized
cttctgctctaattttggtc

SEQ ID NO: 61715 - DNA, 20 bp, Artificial Sequence
  chemically synthesized
tcttctgctctaattttggt

SEQ ID NO: 61716 - DNA, 20 bp, Artificial Sequence
  chemically synthesized
ttttcttctgctctaatttt

SEQ ID NO: 61717 - DNA, 20 bp, Artificial Sequence
  chemically synthesized
tagctctggttgttttcttc

SEQ ID NO: 61718 - DNA, 20 bp, Artificial Sequence
  chemically synthesized
cctgatgcatactcttctag

SEQ ID NO: 61719 - DNA, 20 bp, Artificial Sequence
  chemically synthesized
gccccatgaaaacctggatc

SEQ ID NO: 61720 - DNA, 20 bp, Artificial Sequence
  chemically synthesized
tactgaaagaatctcccaat

SEQ ID NO: 61721 - DNA, 20 bp, Artificial Sequence
  chemically synthesized
aaaatctaccttctactgaa

SEQ ID NO: 61722 - DNA, 20 bp, Artificial Sequence
  chemically synthesized
caaaatctaccttctactga

SEQ ID NO: 61723 - DNA, 20 bp, Artificial Sequence
  chemically synthesized
ctttcaaaatctaccttcta

SEQ ID NO: 61724 - DNA, 20 bp, Artificial Sequence
  chemically synthesized
gctttcaaaatctaccttct

SEQ ID NO: 61725 - DNA, 20 bp, Artificial Sequence
  chemically synthesized
tgctttcaaaatctaccttc

SEQ ID NO: 61726 - DNA, 20 bp, Artificial Sequence
  chemically synthesized
ccctgggagggcccaacaat

SEQ ID NO: 61727 - DNA, 20 bp, Artificial Sequence
  chemically synthesized
cccctgggagggcccaacaa

SEQ ID NO: 61728 - DNA, 20 bp, Artificial Sequence
  chemically synthesized
gcctagtagtgcatttcccc

SEQ ID NO: 61729 - DNA, 20 bp, Artificial Sequence
  chemically synthesized
ttggcctagtagtgcatttc

SEQ ID NO: 61730 - DNA, 20 bp, Artificial Sequence
  chemically synthesized
gttggcctagtagtgcattt

SEQ ID NO: 61731 - DNA, 20 bp, Artificial Sequence
  chemically synthesized
tgttggcctagtagtgcatt

SEQ ID NO: 61732 - DNA, 20 bp, Artificial Sequence
  chemically synthesized
tattttgttggcctagtagt

SEQ ID NO: 61733 - DNA, 20 bp, Artificial Sequence
  chemically synthesized
ctattttgttggcctagtag

SEQ ID NO: 61734 - DNA, 20 bp, Artificial Sequence
  chemically synthesized
tctattttgttggcctagta

SEQ ID NO: 61735 - DNA, 20 bp, Artificial Sequence
  chemically synthesized
tgaatgttttctattttgtt

SEQ ID NO: 61736 - DNA, 20 bp, Artificial Sequence
  chemically synthesized
ataaaataaaaacttatgaa

SEQ ID NO: 61737 - DNA, 20 bp, Artificial Sequence
  chemically synthesized
aactacattaataaaataaa

SEQ ID NO: 61738 - DNA, 20 bp, Artificial Sequence
  chemically synthesized
ccgccaggaaaaggatgaaa

SEQ ID NO: 61739 - DNA, 20 bp, Artificial Sequence
  chemically synthesized
atgcacgatgtagcttaccg

SEQ ID NO: 61740 - DNA, 20 bp, Artificial Sequence
  chemically synthesized
aatgcacgatgtagcttacc

SEQ ID NO: 61741 - DNA, 20 bp, Artificial Sequence
  chemically synthesized
taatgcacgatgtagcttac

SEQ ID NO: 61742 - DNA, 20 bp, Artificial Sequence
  chemically synthesized
caaaagaagtatgtaaaagt

SEQ ID NO: 61743 - DNA, 20 bp, Artificial Sequence
  chemically synthesized
atacatcacacttgcaaaag

SEQ ID NO: 61744 - DNA, 20 bp, Artificial Sequence
  chemically synthesized
aatacatcacacttgcaaaa

SEQ ID NO: 61745 - DNA, 20 bp, Artificial Sequence
  chemically synthesized
tggtgacatttaatacatca

SEQ ID NO: 61746 - DNA, 20 bp, Artificial Sequence
  chemically synthesized
gtggtgacatttaatacatc

SEQ ID NO: 61747 - DNA, 20 bp, Artificial Sequence
  chemically synthesized
acctgagtgtcgtctatcgg

SEQ ID NO: 61748 - DNA, 20 bp, Artificial Sequence
  chemically synthesized
gacctgagtgtcgtctatcg

SEQ ID NO: 61749 - DNA, 20 bp, Artificial Sequence
  chemically synthesized
tgacctgagtgtcgtctatc

SEQ ID NO: 61750 - DNA, 20 bp, Artificial Sequence
  chemically synthesized
aacctgaggctccttttgac

SEQ ID NO: 61751 - DNA, 20 bp, Artificial Sequence
  chemically synthesized
cagttaaacctgaggctcct

SEQ ID NO: 61752 - DNA, 20 bp, Artificial Sequence
  chemically synthesized
ccagttaaacctgaggctcc

SEQ ID NO: 61753 - DNA, 20 bp, Artificial Sequence
  chemically synthesized
tccagttaaacctgaggctc

SEQ ID NO: 61754 - DNA, 20 bp, Artificial Sequence
  chemically synthesized
ttttccagttaaacctgagg

SEQ ID NO: 61755 - DNA, 20 bp, Artificial Sequence
  chemically synthesized
cttttccagttaaacctgag

SEQ ID NO: 61756 - DNA, 20 bp, Artificial Sequence
  chemically synthesized
tcttttccagttaaacctga

SEQ ID NO: 61757 - DNA, 20 bp, Artificial Sequence
  chemically synthesized
ttcttttccagttaaacctg

SEQ ID NO: 61758 - DNA, 20 bp, Artificial Sequence
  chemically synthesized
tttttcttttccagttaaac

SEQ ID NO: 61759 - DNA, 20 bp, Artificial Sequence
  chemically synthesized
ctttttcttttccagttaaa

SEQ ID NO: 61760 - DNA, 20 bp, Artificial Sequence
  chemically synthesized
tttctttttcttttccagtt

SEQ ID NO: 61761 - DNA, 20 bp, Artificial Sequence
  chemically synthesized
atttctttttcttttccagt

SEQ ID NO: 61762 - DNA, 20 bp, Artificial Sequence
  chemically synthesized
gacagaatttatttcttttt

SEQ ID NO: 61763 - DNA, 20 bp, Artificial Sequence
  chemically synthesized
agacagaatttatttctttt

SEQ ID NO: 61764 - DNA, 20 bp, Artificial Sequence
  chemically synthesized
gctgccctttagacagaatt

SEQ ID NO: 61765 - DNA, 20 bp, Artificial Sequence
  chemically synthesized
cttggctgccctttagacag

SEQ ID NO: 61766 - DNA, 20 bp, Artificial Sequence
  chemically synthesized
ccttggctgccctttagaca

SEQ ID NO: 61767 - DNA, 20 bp, Artificial Sequence
  chemically synthesized
tttccttggctgccctttag

SEQ ID NO: 61768 - DNA, 20 bp, Artificial Sequence
  chemically synthesized
aatactataattatttcctt

SEQ ID NO: 61769 - DNA, 20 bp, Artificial Sequence
  chemically synthesized
aaatactataattatttcct

SEQ ID NO: 61770 - DNA, 20 bp, Artificial Sequence
  chemically synthesized
taaatactataattatttcc

SEQ ID NO: 61771 - DNA, 20 bp, Artificial Sequence
  chemically synthesized
cagaggagatgaattttaaa

SEQ ID NO: 61772 - DNA, 20 bp, Artificial Sequence
  chemically synthesized
ctgacacaaaaagggtcaaa

SEQ ID NO: 61773 - DNA, 20 bp, Artificial Sequence
  chemically synthesized
actgacacaaaaagggtcaa

SEQ ID NO: 61774 - DNA, 20 bp, Artificial Sequence
  chemically synthesized
gccatttactgacacaaaaa

SEQ ID NO: 61775 - DNA, 20 bp, Artificial Sequence
  chemically synthesized
tgaatagttggccatttact

SEQ ID NO: 61776 - DNA, 20 bp, Artificial Sequence
  chemically synthesized
ctgaatagttggccatttac

SEQ ID NO: 61777 - DNA, 20 bp, Artificial Sequence
  chemically synthesized
tctgaatagttggccattta

SEQ ID NO: 61778 - DNA, 20 bp, Artificial Sequence
  chemically synthesized
aacccaagaagaagaaatgg

SEQ ID NO: 61779 - DNA, 20 bp, Artificial Sequence
  chemically synthesized
aaacccaagaagaagaaatg

SEQ ID NO: 61780 - DNA, 20 bp, Artificial Sequence
  chemically synthesized
tgcccacctcactcacaagg

SEQ ID NO: 61781 - DNA, 20 bp, Artificial Sequence
  chemically synthesized
ttctgcccacctcactcaca

SEQ ID NO: 61782 - DNA, 20 bp, Artificial Sequence
  chemically synthesized
cttctgcccacctcactcac

SEQ ID NO: 61783 - DNA, 20 bp, Artificial Sequence
  chemically synthesized
tggctccaccgtctgtaatg

SEQ ID NO: 61784 - DNA, 20 bp, Artificial Sequence
  chemically synthesized
catcttgtggctccaccgtc

SEQ ID NO: 61785 - DNA, 20 bp, Artificial Sequence
  chemically synthesized
ccatcttgtggctccaccgt

SEQ ID NO: 61786 - DNA, 20 bp, Artificial Sequence
  chemically synthesized
ggggcactttccatcttgtg

SEQ ID NO: 61787 - DNA, 20 bp, Artificial Sequence
  chemically synthesized
tcccagcagtattaggggca

SEQ ID NO: 61788 - DNA, 20 bp, Artificial Sequence
  chemically synthesized
taacctgcagctggggcttc

SEQ ID NO: 61789 - DNA, 20 bp, Artificial Sequence
  chemically synthesized
ctaacctgcagctggggctt

SEQ ID NO: 61790 - DNA, 20 bp, Artificial Sequence
  chemically synthesized
tcactcacatcagagtcaaa

SEQ ID NO: 61791 - DNA, 20 bp, Artificial Sequence
  chemically synthesized
ctcactcacatcagagtcaa

SEQ ID NO: 61792 - DNA, 20 bp, Artificial Sequence
  chemically synthesized
tttctcactcacatcagagt

SEQ ID NO: 61793 - DNA, 20 bp, Artificial Sequence
  chemically synthesized
atttctcactcacatcagag

SEQ ID NO: 61794 - DNA, 20 bp, Artificial Sequence
  chemically synthesized
acactagctgctgtaacaaa

SEQ ID NO: 61795 - DNA, 20 bp, Artificial Sequence
  chemically synthesized
gtgtaaaattaacactagct

SEQ ID NO: 61796 - DNA, 20 bp, Artificial Sequence
  chemically synthesized
agtgtaaaattaacactagc

SEQ ID NO: 61797 - DNA, 20 bp, Artificial Sequence
  chemically synthesized
tagtgtaaaattaacactag

SEQ ID NO: 61798 - DNA, 20 bp, Artificial Sequence
  chemically synthesized
aaaaggcaaagtggatgtgt

SEQ ID NO: 61799 - DNA, 20 bp, Artificial Sequence
  chemically synthesized
tccaatattcaaaaggcaaa

SEQ ID NO: 61800 - DNA, 20 bp, Artificial Sequence
  chemically synthesized
gtaacaagttctccaatatt

SEQ ID NO: 61801 - DNA, 20 bp, Artificial Sequence
  chemically synthesized
gggctcattagtaacaagtt

SEQ ID NO: 61802 - DNA, 20 bp, Artificial Sequence
  chemically synthesized
ggggctcattagtaacaagt

SEQ ID NO: 61803 - DNA, 20 bp, Artificial Sequence
  chemically synthesized
aatactcctgctttggggct

SEQ ID NO: 61804 - DNA, 20 bp, Artificial Sequence
  chemically synthesized
aaatactcctgctttggggc

SEQ ID NO: 61805 - DNA, 20 bp, Artificial Sequence
  chemically synthesized
caagaataaagactcagagt

SEQ ID NO: 61806 - DNA, 20 bp, Artificial Sequence
  chemically synthesized
ttacaagaataaagactcag

SEQ ID NO: 61807 - DNA, 20 bp, Artificial Sequence
  chemically synthesized
attacaagaataaagactca

SEQ ID NO: 61808 - DNA, 20 bp, Artificial Sequence
  chemically synthesized
tattacaagaataaagactc

SEQ ID NO: 61809 - DNA, 20 bp, Artificial Sequence
  chemically synthesized
acagcatataacctaatttt

SEQ ID NO: 61810 - DNA, 20 bp, Artificial Sequence
  chemically synthesized
atgtcactgtagctgagacg

SEQ ID NO: 61811 - DNA, 20 bp, Artificial Sequence
  chemically synthesized
gccagggccaggatgcagac

SEQ ID NO: 61812 - DNA, 20 bp, Artificial Sequence
  chemically synthesized
tggaaggtcttagccagggc

SEQ ID NO: 61813 - DNA, 20 bp, Artificial Sequence
  chemically synthesized
aggcagtgagactgacagag

SEQ ID NO: 61814 - DNA, 20 bp, Artificial Sequence
  chemically synthesized
agcattaaggcagtgagact

SEQ ID NO: 61815 - DNA, 20 bp, Artificial Sequence
  chemically synthesized
atactaacagcaaccctgca

SEQ ID NO: 61816 - DNA, 20 bp, Artificial Sequence
  chemically synthesized
gatactaacagcaaccctgc

SEQ ID NO: 61817 - DNA, 20 bp, Artificial Sequence
  chemically synthesized
gcatgtgtggagcatttgat

SEQ ID NO: 61818 - DNA, 20 bp, Artificial Sequence
  chemically synthesized
tgcctgaaataataccaatc

SEQ ID NO: 61819 - DNA, 20 bp, Artificial Sequence
  chemically synthesized
ttctgcctgaaataatacca

SEQ ID NO: 61820 - DNA, 20 bp, Artificial Sequence
  chemically synthesized
gttctgcctgaaataatacc

SEQ ID NO: 61821 - DNA, 20 bp, Artificial Sequence
  chemically synthesized
tctgggtttgttctgcctga

SEQ ID NO: 61822 - DNA, 20 bp, Artificial Sequence
  chemically synthesized
ctctgggtttgttctgcctg

SEQ ID NO: 61823 - DNA, 20 bp, Artificial Sequence
  chemically synthesized
taggaaatcaatacctttct

SEQ ID NO: 61824 - DNA, 20 bp, Artificial Sequence
  chemically synthesized
ctaggaaatcaatacctttc

SEQ ID NO: 61825 - DNA, 20 bp, Artificial Sequence
  chemically synthesized
ccaggctgtgaccaacaagc

SEQ ID NO: 61826 - DNA, 20 bp, Artificial Sequence
  chemically synthesized
tgaacaactgcgcctgagat

SEQ ID NO: 61827 - DNA, 20 bp, Artificial Sequence
  chemically synthesized
ttgtgaacaactgcgcctga

SEQ ID NO: 61828 - DNA, 20 bp, Artificial Sequence
  chemically synthesized
aatcccagctcacactctac

SEQ ID NO: 61829 - DNA, 20 bp, Artificial Sequence
  chemically synthesized
aaatcccagctcacactcta

SEQ ID NO: 61830 - DNA, 20 bp, Artificial Sequence
  chemically synthesized
ggccggcaagtaactttaaa

SEQ ID NO: 61831 - DNA, 20 bp, Artificial Sequence
  chemically synthesized
ttgggccggcaagtaacttt

SEQ ID NO: 61832 - DNA, 20 bp, Artificial Sequence
  chemically synthesized
attgggccggcaagtaactt

SEQ ID NO: 61833 - DNA, 20 bp, Artificial Sequence
  chemically synthesized
tattgggccggcaagtaact

SEQ ID NO: 61834 - DNA, 20 bp, Artificial Sequence
  chemically synthesized
agtacctctaaggcaaagca

SEQ ID NO: 61835 - DNA, 20 bp, Artificial Sequence
  chemically synthesized
cagtacctctaaggcaaagc

SEQ ID NO: 61836 - DNA, 20 bp, Artificial Sequence
  chemically synthesized
tcagtacctctaaggcaaag

SEQ ID NO: 61837 - DNA, 20 bp, Artificial Sequence
  chemically synthesized
ttcagtacctctaaggcaaa

SEQ ID NO: 61838 - DNA, 20 bp, Artificial Sequence
  chemically synthesized
tttcagtacctctaaggcaa

SEQ ID NO: 61839 - DNA, 20 bp, Artificial Sequence
  chemically synthesized
ttttcagtacctctaaggca

SEQ ID NO: 61840 - DNA, 20 bp, Artificial Sequence
  chemically synthesized
tttttcagtacctctaaggc

SEQ ID NO: 61841 - DNA, 20 bp, Artificial Sequence
  chemically synthesized
cttttttttcagtacctcta

SEQ ID NO: 61842 - DNA, 20 bp, Artificial Sequence
  chemically synthesized
caacccatccaagggtgaaa

SEQ ID NO: 61843 - DNA, 20 bp, Artificial Sequence
  chemically synthesized
acaacccatccaagggtgaa

SEQ ID NO: 61844 - DNA, 20 bp, Artificial Sequence
  chemically synthesized
tacaacccatccaagggtga

SEQ ID NO: 61845 - DNA, 20 bp, Artificial Sequence
  chemically synthesized
cccttttacaacccatccaa

SEQ ID NO: 61846 - DNA, 20 bp, Artificial Sequence
  chemically synthesized
ataaacttccccttttacaa

SEQ ID NO: 61847 - DNA, 20 bp, Artificial Sequence
  chemically synthesized
gataaacttccccttttaca

SEQ ID NO: 61848 - DNA, 20 bp, Artificial Sequence
  chemically synthesized
tgataaacttccccttttac

SEQ ID NO: 61849 - DNA, 20 bp, Artificial Sequence
  chemically synthesized
ccttttgataaacttcccct

SEQ ID NO: 61850 - DNA, 20 bp, Artificial Sequence
  chemically synthesized
cccttttgataaacttcccc

SEQ ID NO: 61851 - DNA, 20 bp, Artificial Sequence
  chemically synthesized
tcccttttgataaacttccc

SEQ ID NO: 61852 - DNA, 20 bp, Artificial Sequence
  chemically synthesized
cctctaagtccagggcattt

SEQ ID NO: 61853 - DNA, 20 bp, Artificial Sequence
  chemically synthesized
ctcctgcttccctctaagtc

SEQ ID NO: 61854 - DNA, 20 bp, Artificial Sequence
  chemically synthesized
cctcctgcttccctctaagt

SEQ ID NO: 61855 - DNA, 20 bp, Artificial Sequence
  chemically synthesized
tccacccactgcctttcctc

SEQ ID NO: 61856 - DNA, 20 bp, Artificial Sequence
  chemically synthesized
ggctgttctccacccactgc

SEQ ID NO: 61857 - DNA, 20 bp, Artificial Sequence
  chemically synthesized
tctgttcggctgttctccac

SEQ ID NO: 61858 - DNA, 20 bp, Artificial Sequence
  chemically synthesized
ccagcattctctgttcggct

SEQ ID NO: 61859 - DNA, 20 bp, Artificial Sequence
  chemically synthesized
agaatggaatggagagcagg

SEQ ID NO: 61860 - DNA, 20 bp, Artificial Sequence
  chemically synthesized
ttgagaatggaatggagagc

SEQ ID NO: 61861 - DNA, 20 bp, Artificial Sequence
  chemically synthesized
agctcagaaggccttgttga

SEQ ID NO: 61862 - DNA, 20 bp, Artificial Sequence
  chemically synthesized
aaagatgggcacagggcagg

SEQ ID NO: 61863 - DNA, 20 bp, Artificial Sequence
  chemically synthesized
ttaaaagatgggcacagggc

SEQ ID NO: 61864 - DNA, 20 bp, Artificial Sequence
  chemically synthesized
ctctattattaaaagatggg

SEQ ID NO: 61865 - DNA, 20 bp, Artificial Sequence
  chemically synthesized
aattcctctattattaaaag

SEQ ID NO: 61866 - DNA, 20 bp, Artificial Sequence
  chemically synthesized
cttcaattcctctattatta

SEQ ID NO: 61867 - DNA, 20 bp, Artificial Sequence
  chemically synthesized
ttccttcaattcctctatta

SEQ ID NO: 61868 - DNA, 20 bp, Artificial Sequence
  chemically synthesized
ggagatgtgttcttccttca

SEQ ID NO: 61869 - DNA, 20 bp, Artificial Sequence
  chemically synthesized
aagacagcataagcaaagca

SEQ ID NO: 61870 - DNA, 20 bp, Artificial Sequence
  chemically synthesized
gaagacagcataagcaaagc

SEQ ID NO: 61871 - DNA, 20 bp, Artificial Sequence
  chemically synthesized
tttgaagacagcataagcaa

SEQ ID NO: 61872 - DNA, 20 bp, Artificial Sequence
  chemically synthesized
tcaatatgctggtgataagt

SEQ ID NO: 61873 - DNA, 20 bp, Artificial Sequence
  chemically synthesized
cttatcaatatgctggtgat

SEQ ID NO: 61874 - DNA, 20 bp, Artificial Sequence
  chemically synthesized
ccttatcaatatgctggtga

SEQ ID NO: 61875 - DNA, 20 bp, Artificial Sequence
  chemically synthesized
agtttccttatcaatatgct

SEQ ID NO: 61876 - DNA, 20 bp, Artificial Sequence
  chemically synthesized
tctgaaattcagtttcctta

SEQ ID NO: 61877 - DNA, 20 bp, Artificial Sequence
  chemically synthesized
acttctctgaaattcagttt

SEQ ID NO: 61878 - DNA, 20 bp, Artificial Sequence
  chemically synthesized
caggggcctgaatgtaatta

SEQ ID NO: 61879 - DNA, 20 bp, Artificial Sequence
  chemically synthesized
acaggggcctgaatgtaatt

SEQ ID NO: 61880 - DNA, 20 bp, Artificial Sequence
  chemically synthesized
tacaggggcctgaatgtaat

SEQ ID NO: 61881 - DNA, 20 bp, Artificial Sequence
  chemically synthesized
aaccattttacaggggcctg

SEQ ID NO: 61882 - DNA, 20 bp, Artificial Sequence
  chemically synthesized
aaaccattttacaggggcct

SEQ ID NO: 61883 - DNA, 20 bp, Artificial Sequence
  chemically synthesized
gatccctttaaaccatttta

SEQ ID NO: 61884 - DNA, 20 bp, Artificial Sequence
  chemically synthesized
ggatccctttaaaccatttt

SEQ ID NO: 61885 - DNA, 20 bp, Artificial Sequence
  chemically synthesized
tgatatgtaacaaggtagag

SEQ ID NO: 61886 - DNA, 20 bp, Artificial Sequence
  chemically synthesized
aggaaaactgtccagagggc

SEQ ID NO: 61887 - DNA, 20 bp, Artificial Sequence
  chemically synthesized
agcttgaggaaaactgtcca

SEQ ID NO: 61888 - DNA, 20 bp, Artificial Sequence
  chemically synthesized
gagcttgaggaaaactgtcc

SEQ ID NO: 61889 - DNA, 20 bp, Artificial Sequence
  chemically synthesized
ctcaaagaaatcatttgagc

SEQ ID NO: 61890 - DNA, 20 bp, Artificial Sequence
  chemically synthesized
gctcaaagaaatcatttgag

SEQ ID NO: 61891 - DNA, 20 bp, Artificial Sequence
  chemically synthesized
taatttgctcaaagaaatca

SEQ ID NO: 61892 - DNA, 20 bp, Artificial Sequence
  chemically synthesized
ctaatttgctcaaagaaatc

SEQ ID NO: 61893 - DNA, 20 bp, Artificial Sequence
  chemically synthesized
tctaatttgctcaaagaaat

SEQ ID NO: 61894 - DNA, 20 bp, Artificial Sequence
  chemically synthesized
ttctaatttgctcaaagaaa

SEQ ID NO: 61895 - DNA, 20 bp, Artificial Sequence
  chemically synthesized
atgaatgagcccctttttct

SEQ ID NO: 61896 - DNA, 20 bp, Artificial Sequence
  chemically synthesized
cttgatgaatgagccccttt

SEQ ID NO: 61897 - DNA, 20 bp, Artificial Sequence
  chemically synthesized
cctctgaagtattgcttgat

SEQ ID NO: 61898 - DNA, 20 bp, Artificial Sequence
  chemically synthesized
tacaagaatctattccctct

SEQ ID NO: 61899 - DNA, 20 bp, Artificial Sequence
  chemically synthesized
agattgtacaagaatctatt

SEQ ID NO: 61900 - DNA, 20 bp, Artificial Sequence
  chemically synthesized
ttcagattgtacaagaatct

SEQ ID NO: 61901 - DNA, 20 bp, Artificial Sequence
  chemically synthesized
atatgattattcagattgta

SEQ ID NO: 61902 - DNA, 20 bp, Artificial Sequence
  chemically synthesized
gcagagtagattgatatgat

SEQ ID NO: 61903 - DNA, 20 bp, Artificial Sequence
  chemically synthesized
tcttagcagagtagattgat

SEQ ID NO: 61904 - DNA, 20 bp, Artificial Sequence
  chemically synthesized
ccacttctcttagcagagta

SEQ ID NO: 61905 - DNA, 20 bp, Artificial Sequence
  chemically synthesized
caacccagtaaggctgaaga

SEQ ID NO: 61906 - DNA, 20 bp, Artificial Sequence
  chemically synthesized
agcatcttccaacccagtaa

SEQ ID NO: 61907 - DNA, 20 bp, Artificial Sequence
  chemically synthesized
aagcatcttccaacccagta

SEQ ID NO: 61908 - DNA, 20 bp, Artificial Sequence
  chemically synthesized
tttaagcatcttccaaccca

SEQ ID NO: 61909 - DNA, 20 bp, Artificial Sequence
  chemically synthesized
cccttgtttaagcatcttcc

SEQ ID NO: 61910 - DNA, 20 bp, Artificial Sequence
  chemically synthesized
agccccagagccagtgctcc

SEQ ID NO: 61911 - DNA, 20 bp, Artificial Sequence
  chemically synthesized
tgattgagccccagagccag

SEQ ID NO: 61912 - DNA, 20 bp, Artificial Sequence
  chemically synthesized
aactggatgcttctgattga

SEQ ID NO: 61913 - DNA, 20 bp, Artificial Sequence
  chemically synthesized
aaactggatgcttctgattg

SEQ ID NO: 61914 - DNA, 20 bp, Artificial Sequence
  chemically synthesized
agtgagtttaaactggatgc

SEQ ID NO: 61915 - DNA, 20 bp, Artificial Sequence
  chemically synthesized
aagtgagtttaaactggatg

SEQ ID NO: 61916 - DNA, 20 bp, Artificial Sequence
  chemically synthesized
atggaactaccatttaagtg

SEQ ID NO: 61917 - DNA, 20 bp, Artificial Sequence
  chemically synthesized
attaatggaactaccattta

SEQ ID NO: 61918 - DNA, 20 bp, Artificial Sequence
  chemically synthesized
taggtcctaatgggacactt

SEQ ID NO: 61919 - DNA, 20 bp, Artificial Sequence
  chemically synthesized
gggctatggcaagcacccct

SEQ ID NO: 61920 - DNA, 20 bp, Artificial Sequence
  chemically synthesized
gaaggggtagtgtgagtctc

SEQ ID NO: 61921 - DNA, 20 bp, Artificial Sequence
  chemically synthesized
ggaaggggtagtgtgagtct

SEQ ID NO: 61922 - DNA, 20 bp, Artificial Sequence
  chemically synthesized
cagtctccatcccccagcag

SEQ ID NO: 61923 - DNA, 20 bp, Artificial Sequence
  chemically synthesized
catgcacataagcactcaca

SEQ ID NO: 61924 - DNA, 20 bp, Artificial Sequence
  chemically synthesized
caaaactccacaccagcatg

SEQ ID NO: 61925 - DNA, 20 bp, Artificial Sequence
  chemically synthesized
ttacaaaactccacaccagc

SEQ ID NO: 61926 - DNA, 20 bp, Artificial Sequence
  chemically synthesized
tgacaaggtcctggagcatc

SEQ ID NO: 61927 - DNA, 20 bp, Artificial Sequence
  chemically synthesized
tcagtcttctgacaaggtcc

SEQ ID NO: 61928 - DNA, 20 bp, Artificial Sequence
  chemically synthesized
tctgagagtgagcagagaag

SEQ ID NO: 61929 - DNA, 20 bp, Artificial Sequence
  chemically synthesized
agttctctgagagtgagcag

SEQ ID NO: 61930 - DNA, 20 bp, Artificial Sequence
  chemically synthesized
caaatatacattcagttctc

SEQ ID NO: 61931 - DNA, 20 bp, Artificial Sequence
  chemically synthesized
cattgcaaatatacattcag

SEQ ID NO: 61932 - DNA, 20 bp, Artificial Sequence
  chemically synthesized
acattgcaaatatacattca

SEQ ID NO: 61933 - DNA, 20 bp, Artificial Sequence
  chemically synthesized
accatttacattgcaaatat

SEQ ID NO: 61934 - DNA, 20 bp, Artificial Sequence
  chemically synthesized
gagatgaggtccctatggat

SEQ ID NO: 61935 - DNA, 20 bp, Artificial Sequence
  chemically synthesized
ggagatgaggtccctatgga

SEQ ID NO: 61936 - DNA, 20 bp, Artificial Sequence
  chemically synthesized
tgatcatttggagatgaggt

SEQ ID NO: 61937 - DNA, 20 bp, Artificial Sequence
  chemically synthesized
ggttctgatcatttggagat

SEQ ID NO: 61938 - DNA, 20 bp, Artificial Sequence
  chemically synthesized
taaaaagttgggttctgatc

SEQ ID NO: 61939 - DNA, 20 bp, Artificial Sequence
  chemically synthesized
acaacaacagggtatctctg

SEQ ID NO: 61940 - DNA, 20 bp, Artificial Sequence
  chemically synthesized
gacaacaacagggtatctct

SEQ ID NO: 61941 - DNA, 20 bp, Artificial Sequence
  chemically synthesized
ggggaagagaactggctttg

SEQ ID NO: 61942 - DNA, 20 bp, Artificial Sequence
  chemically synthesized
gccatgaccagtgtgggtcc

SEQ ID NO: 61943 - DNA, 20 bp, Artificial Sequence
  chemically synthesized
gccacacagaagcagcattg

SEQ ID NO: 61944 - DNA, 20 bp, Artificial Sequence
  chemically synthesized
ggcagatggctgtgcatgtt

SEQ ID NO: 61945 - DNA, 20 bp, Artificial Sequence
  chemically synthesized
tgaaaaggcaaatgtagtag

SEQ ID NO: 61946 - DNA, 20 bp, Artificial Sequence
  chemically synthesized
acttgtgaaaaggcaaatgt

SEQ ID NO: 61947 - DNA, 20 bp, Artificial Sequence
  chemically synthesized
catgtgtgaacaattaactt

SEQ ID NO: 61948 - DNA, 20 bp, Artificial Sequence
  chemically synthesized
actaagatgataaaatagag

SEQ ID NO: 61949 - DNA, 20 bp, Artificial Sequence
  chemically synthesized
cactaagatgataaaataga

SEQ ID NO: 61950 - DNA, 20 bp, Artificial Sequence
  chemically synthesized
tttcactaagatgataaaat

SEQ ID NO: 61951 - DNA, 20 bp, Artificial Sequence
  chemically synthesized
gtttcactaagatgataaaa

SEQ ID NO: 61952 - DNA, 20 bp, Artificial Sequence
  chemically synthesized
tgtttcactaagatgataaa

SEQ ID NO: 61953 - DNA, 20 bp, Artificial Sequence
  chemically synthesized
tctcagttttgtttcactaa

SEQ ID NO: 61954 - DNA, 20 bp, Artificial Sequence
  chemically synthesized
gtctcagttttgtttcacta

SEQ ID NO: 61955 - DNA, 20 bp, Artificial Sequence
  chemically synthesized
gagataagaaagagtaagaa

SEQ ID NO: 61956 - DNA, 20 bp, Artificial Sequence
  chemically synthesized
aaggtaagagagcaatactc

SEQ ID NO: 61957 - DNA, 20 bp, Artificial Sequence
  chemically synthesized
aaccctcaaaaagaaaatta

SEQ ID NO: 61958 - DNA, 20 bp, Artificial Sequence
  chemically synthesized
gctcccccttcaaccctcaa

SEQ ID NO: 61959 - DNA, 20 bp, Artificial Sequence
  chemically synthesized
cctattcgctcccccttcaa

SEQ ID NO: 61960 - DNA, 20 bp, Artificial Sequence
  chemically synthesized
gcattccctattcgctcccc

SEQ ID NO: 61961 - DNA, 20 bp, Artificial Sequence
  chemically synthesized
agcattccctattcgctccc

SEQ ID NO: 61962 - DNA, 20 bp, Artificial Sequence
  chemically synthesized
tagcattccctattcgctcc

SEQ ID NO: 61963 - DNA, 20 bp, Artificial Sequence
  chemically synthesized
aaaatacttttagcattccc

SEQ ID NO: 61964 - DNA, 20 bp, Artificial Sequence
  chemically synthesized
accatgtcttaaaaatactt

SEQ ID NO: 61965 - DNA, 20 bp, Artificial Sequence
  chemically synthesized
aatgttaaccatgtcttaaa

SEQ ID NO: 61966 - DNA, 20 bp, Artificial Sequence
  chemically synthesized
aaatgttaaccatgtcttaa

SEQ ID NO: 61967 - DNA, 20 bp, Artificial Sequence
  chemically synthesized
ctgatttaaatgttaaccat

SEQ ID NO: 61968 - DNA, 20 bp, Artificial Sequence
  chemically synthesized
actgatttaaatgttaacca

SEQ ID NO: 61969 - DNA, 20 bp, Artificial Sequence
  chemically synthesized
ctcaaagtttactgatttaa

SEQ ID NO: 61970 - DNA, 20 bp, Artificial Sequence
  chemically synthesized
actcaaagtttactgattta

SEQ ID NO: 61971 - DNA, 20 bp, Artificial Sequence
  chemically synthesized
tactgatgaggtgatgccca

SEQ ID NO: 61972 - DNA, 20 bp, Artificial Sequence
  chemically synthesized
ctctagaggccttctactga

SEQ ID NO: 61973 - DNA, 20 bp, Artificial Sequence
  chemically synthesized
gctctagaggccttctactg

SEQ ID NO: 61974 - DNA, 20 bp, Artificial Sequence
  chemically synthesized
agggaacctctgtctttgct

SEQ ID NO: 61975 - DNA, 20 bp, Artificial Sequence
  chemically synthesized
ttcagggaacctctgtcttt

SEQ ID NO: 61976 - DNA, 20 bp, Artificial Sequence
  chemically synthesized
ttcttcagggaacctctgtc

SEQ ID NO: 61977 - DNA, 20 bp, Artificial Sequence
  chemically synthesized
cttcttcttcagggaacctc

SEQ ID NO: 61978 - DNA, 20 bp, Artificial Sequence
  chemically synthesized
agacagacttgcttcttctt

SEQ ID NO: 61979 - DNA, 20 bp, Artificial Sequence
  chemically synthesized
tactcttgagacagacttgc

SEQ ID NO: 61980 - DNA, 20 bp, Artificial Sequence
  chemically synthesized
tgtattgtactcttgagaca

SEQ ID NO: 61981 - DNA, 20 bp, Artificial Sequence
  chemically synthesized
ctgtattgtactcttgagac

SEQ ID NO: 61982 - DNA, 20 bp, Artificial Sequence
  chemically synthesized
tctgtattgtactcttgaga

SEQ ID NO: 61983 - DNA, 20 bp, Artificial Sequence
  chemically synthesized
cgcagggcaagaaactcaag

SEQ ID NO: 61984 - DNA, 20 bp, Artificial Sequence
  chemically synthesized
agcctaaattccgcagggca

SEQ ID NO: 61985 - DNA, 20 bp, Artificial Sequence
  chemically synthesized
aggaaagagtgcagtattga

SEQ ID NO: 61986 - DNA, 20 bp, Artificial Sequence
  chemically synthesized
tgggaactggcaatcgcaaa

SEQ ID NO: 61987 - DNA, 20 bp, Artificial Sequence
  chemically synthesized
tggttgtgggaactggcaat

SEQ ID NO: 61988 - DNA, 20 bp, Artificial Sequence
  chemically synthesized
gtggttgtgggaactggcaa

SEQ ID NO: 61989 - DNA, 20 bp, Artificial Sequence
  chemically synthesized
tgtggttgtgggaactggca

SEQ ID NO: 61990 - DNA, 20 bp, Artificial Sequence
  chemically synthesized
acttttgtggttgtgggaac

SEQ ID NO: 61991 - DNA, 20 bp, Artificial Sequence
  chemically synthesized
agaaattgacttttgtggtt

SEQ ID NO: 61992 - DNA, 20 bp, Artificial Sequence
  chemically synthesized
tattaagaaattgacttttg

SEQ ID NO: 61993 - DNA, 20 bp, Artificial Sequence
  chemically synthesized
ctattaagaaattgactttt

SEQ ID NO: 61994 - DNA, 20 bp, Artificial Sequence
  chemically synthesized
ataggagagatttctattaa

SEQ ID NO: 61995 - DNA, 20 bp, Artificial Sequence
  chemically synthesized
tacaaaaaaaaaagggaatc

SEQ ID NO: 61996 - DNA, 20 bp, Artificial Sequence
  chemically synthesized
ctacaaaaaaaaaagggaat

SEQ ID NO: 61997 - DNA, 20 bp, Artificial Sequence
  chemically synthesized
tctacaaaaaaaaaagggaa

SEQ ID NO: 61998 - DNA, 20 bp, Artificial Sequence
  chemically synthesized
gtcagagttttctacaaaaa

SEQ ID NO: 61999 - DNA, 20 bp, Artificial Sequence
  chemically synthesized
tctattagtcagagttttct

SEQ ID NO: 62000 - DNA, 20 bp, Artificial Sequence
  chemically synthesized
aaaagcatatatgccttctc

SEQ ID NO: 62001 - DNA, 20 bp, Artificial Sequence
  chemically synthesized
aaaaagcatatatgccttct

SEQ ID NO: 62002 - DNA, 20 bp, Artificial Sequence
  chemically synthesized
taaaaagcatatatgccttc

SEQ ID NO: 62003 - DNA, 20 bp, Artificial Sequence
  chemically synthesized
ttttaaaaagcatatatgcc

SEQ ID NO: 62004 - DNA, 20 bp, Artificial Sequence
  chemically synthesized
tcaagttattttaaaaagca

SEQ ID NO: 62005 - DNA, 20 bp, Artificial Sequence
  chemically synthesized
gctaacttatcaagttattt

SEQ ID NO: 62006 - DNA, 20 bp, Artificial Sequence
  chemically synthesized
agctaacttatcaagttatt

SEQ ID NO: 62007 - DNA, 20 bp, Artificial Sequence
  chemically synthesized
tgagtaagtttagctaactt

SEQ ID NO: 62008 - DNA, 20 bp, Artificial Sequence
  chemically synthesized
tccccaaatccccacaacat

SEQ ID NO: 62009 - DNA, 20 bp, Artificial Sequence
  chemically synthesized
tggtcttctccccaaatccc

SEQ ID NO: 62010 - DNA, 20 bp, Artificial Sequence
  chemically synthesized
cttgtggtcttctccccaaa

SEQ ID NO: 62011 - DNA, 20 bp, Artificial Sequence
  chemically synthesized
tcccaaattccttgtggtct

SEQ ID NO: 62012 - DNA, 20 bp, Artificial Sequence
  chemically synthesized
cctgtccttctcccaaattc

SEQ ID NO: 62013 - DNA, 20 bp, Artificial Sequence
  chemically synthesized
cttacctgtccttctcccaa

SEQ ID NO: 62014 - DNA, 20 bp, Artificial Sequence
  chemically synthesized
cttccttacctgtccttctc

SEQ ID NO: 62015 - DNA, 20 bp, Artificial Sequence
  chemically synthesized
ccttccttacctgtccttct

SEQ ID NO: 62016 - DNA, 20 bp, Artificial Sequence
  chemically synthesized
tctgtcctttccttccttac

SEQ ID NO: 62017 - DNA, 20 bp, Artificial Sequence
  chemically synthesized
cttatctgtcctttccttcc

SEQ ID NO: 62018 - DNA, 20 bp, Artificial Sequence
  chemically synthesized
cttccttatctgtcctttcc

SEQ ID NO: 62019 - DNA, 20 bp, Artificial Sequence
  chemically synthesized
ccttccttatctgtcctttc

SEQ ID NO: 62020 - DNA, 20 bp, Artificial Sequence
  chemically synthesized
ctgtcatccatcacaggtgt

SEQ ID NO: 62021 - DNA, 20 bp, Artificial Sequence
  chemically synthesized
tgcaaacctacatgaagtgg

SEQ ID NO: 62022 - DNA, 20 bp, Artificial Sequence
  chemically synthesized
gtgcaaacctacatgaagtg

SEQ ID NO: 62023 - DNA, 20 bp, Artificial Sequence
  chemically synthesized
aaacccaggtgtgaaagata

SEQ ID NO: 62024 - DNA, 20 bp, Artificial Sequence
  chemically synthesized
tgaggatcttcaaacccagg

SEQ ID NO: 62025 - DNA, 20 bp, Artificial Sequence
  chemically synthesized
ctgcagtgaaagaattctga

SEQ ID NO: 62026 - DNA, 20 bp, Artificial Sequence
  chemically synthesized
cctgcagtgaaagaattctg

SEQ ID NO: 62027 - DNA, 20 bp, Artificial Sequence
  chemically synthesized
tactttcctgcagtgaaaga

SEQ ID NO: 62028 - DNA, 20 bp, Artificial Sequence
  chemically synthesized
atactttcctgcagtgaaag

SEQ ID NO: 62029 - DNA, 20 bp, Artificial Sequence
  chemically synthesized
aaatttatactttcctgcag

SEQ ID NO: 62030 - DNA, 20 bp, Artificial Sequence
  chemically synthesized
taataaatgaaaagcttgaa

SEQ ID NO: 62031 - DNA, 20 bp, Artificial Sequence
  chemically synthesized
ataataaatgaaaagcttga

SEQ ID NO: 62032 - DNA, 20 bp, Artificial Sequence
  chemically synthesized
tataataaatgaaaagcttg

SEQ ID NO: 62033 - DNA, 20 bp, Artificial Sequence
  chemically synthesized
ttataataaatgaaaagctt

SEQ ID NO: 62034 - DNA, 20 bp, Artificial Sequence
  chemically synthesized
cctactgtaaatttttataa

SEQ ID NO: 62035 - DNA, 20 bp, Artificial Sequence
  chemically synthesized
aaagtagacaaatagtggaa

SEQ ID NO: 62036 - DNA, 20 bp, Artificial Sequence
  chemically synthesized
tgtaggttaaaagtagacaa

SEQ ID NO: 62037 - DNA, 20 bp, Artificial Sequence
  chemically synthesized
ggctacctgaaaacactgtg

SEQ ID NO: 62038 - DNA, 20 bp, Artificial Sequence
  chemically synthesized
gggctacctgaaaacactgt

SEQ ID NO: 62039 - DNA, 20 bp, Artificial Sequence
  chemically synthesized
tgggctacctgaaaacactg

SEQ ID NO: 62040 - DNA, 20 bp, Artificial Sequence
  chemically synthesized
tcacttttgggctacctgaa

SEQ ID NO: 62041 - DNA, 20 bp, Artificial Sequence
  chemically synthesized
tatataaaagtatggttgtc

SEQ ID NO: 62042 - DNA, 20 bp, Artificial Sequence
  chemically synthesized
gagaaaagagtctaacctgc

SEQ ID NO: 62043 - DNA, 20 bp, Artificial Sequence
  chemically synthesized
gaaagagcaatatatgtgtg

SEQ ID NO: 62044 - DNA, 20 bp, Artificial Sequence
  chemically synthesized
ctgattggaaagagcaatat

SEQ ID NO: 62045 - DNA, 20 bp, Artificial Sequence
  chemically synthesized
ttactgattggaaagagcaa

SEQ ID NO: 62046 - DNA, 20 bp, Artificial Sequence
  chemically synthesized
atcgagacaaagaaattctt

SEQ ID NO: 62047 - DNA, 20 bp, Artificial Sequence
  chemically synthesized
catcgagacaaagaaattct

SEQ ID NO: 62048 - DNA, 20 bp, Artificial Sequence
  chemically synthesized
aggaaactacaagagatata

SEQ ID NO: 62049 - DNA, 20 bp, Artificial Sequence
  chemically synthesized
caggaaactacaagagatat

SEQ ID NO: 62050 - DNA, 20 bp, Artificial Sequence
  chemically synthesized
ctacagtggggccctcgtgg

SEQ ID NO: 62051 - DNA, 20 bp, Artificial Sequence
  chemically synthesized
ttcctacagtggggccctcg

SEQ ID NO: 62052 - DNA, 20 bp, Artificial Sequence
  chemically synthesized
attcctacagtggggccctc

SEQ ID NO: 62053 - DNA, 20 bp, Artificial Sequence
  chemically synthesized
tattcctacagtggggccct

SEQ ID NO: 62054 - DNA, 20 bp, Artificial Sequence
  chemically synthesized
ttattcctacagtggggccc

SEQ ID NO: 62055 - DNA, 20 bp, Artificial Sequence
  chemically synthesized
cactgcatacaggaactcct

SEQ ID NO: 62056 - DNA, 20 bp, Artificial Sequence
  chemically synthesized
aagtcaaacatacatcaatg

SEQ ID NO: 62057 - DNA, 20 bp, Artificial Sequence
  chemically synthesized
ctgaacatgcctccactcac

SEQ ID NO: 62058 - DNA, 20 bp, Artificial Sequence
  chemically synthesized
tctctcattcctgaacatgc

SEQ ID NO: 62059 - DNA, 20 bp, Artificial Sequence
  chemically synthesized
attatctctcattcctgaac

SEQ ID NO: 62060 - DNA, 20 bp, Artificial Sequence
  chemically synthesized
attcattatctctcattcct

SEQ ID NO: 62061 - DNA, 20 bp, Artificial Sequence
  chemically synthesized
aattcattatctctcattcc

SEQ ID NO: 62062 - DNA, 20 bp, Artificial Sequence
  chemically synthesized
taattcattatctctcattc

SEQ ID NO: 62063 - DNA, 20 bp, Artificial Sequence
  chemically synthesized
taagtaaatcatcactaagt

SEQ ID NO: 62064 - DNA, 20 bp, Artificial Sequence
  chemically synthesized
catctaattctaagtaaatc

SEQ ID NO: 62065 - DNA, 20 bp, Artificial Sequence
  chemically synthesized
aattgcatctaattctaagt

SEQ ID NO: 62066 - DNA, 20 bp, Artificial Sequence
  chemically synthesized
aggttcaattgcatctaatt

SEQ ID NO: 62067 - DNA, 20 bp, Artificial Sequence
  chemically synthesized
caggttcaattgcatctaat

SEQ ID NO: 62068 - DNA, 20 bp, Artificial Sequence
  chemically synthesized
actatttcaggttcaattgc

SEQ ID NO: 62069 - DNA, 20 bp, Artificial Sequence
  chemically synthesized
taaatatgtcttgactattt

SEQ ID NO: 62070 - DNA, 20 bp, Artificial Sequence
  chemically synthesized
ataaatatgtcttgactatt

SEQ ID NO: 62071 - DNA, 20 bp, Artificial Sequence
  chemically synthesized
tataaatatgtcttgactat

SEQ ID NO: 62072 - DNA, 20 bp, Artificial Sequence
  chemically synthesized
ccataattttataaatatgt

SEQ ID NO: 62073 - DNA, 20 bp, Artificial Sequence
  chemically synthesized
cccataattttataaatatg

SEQ ID NO: 62074 - DNA, 20 bp, Artificial Sequence
  chemically synthesized
taaaaatatagaaatttccc

SEQ ID NO: 62075 - DNA, 20 bp, Artificial Sequence
  chemically synthesized
agtgatcaattataaaaata

SEQ ID NO: 62076 - DNA, 20 bp, Artificial Sequence
  chemically synthesized
cagtgatcaattataaaaat

SEQ ID NO: 62077 - DNA, 20 bp, Artificial Sequence
  chemically synthesized
tcagtgatcaattataaaaa

SEQ ID NO: 62078 - DNA, 20 bp, Artificial Sequence
  chemically synthesized
ttcagtgatcaattataaaa

SEQ ID NO: 62079 - DNA, 20 bp, Artificial Sequence
  chemically synthesized
tttttcagtgatcaattata

SEQ ID NO: 62080 - DNA, 20 bp, Artificial Sequence
  chemically synthesized
gtttttcagtgatcaattat

SEQ ID NO: 62081 - DNA, 20 bp, Artificial Sequence
  chemically synthesized
atctaaacaaagtatttgtt

SEQ ID NO: 62082 - DNA, 20 bp, Artificial Sequence
  chemically synthesized
aatctaaacaaagtatttgt

SEQ ID NO: 62083 - DNA, 20 bp, Artificial Sequence
  chemically synthesized
taatctaaacaaagtatttg

SEQ ID NO: 62084 - DNA, 20 bp, Artificial Sequence
  chemically synthesized
ttaatctaaacaaagtattt

SEQ ID NO: 62085 - DNA, 20 bp, Artificial Sequence
  chemically synthesized
ctttttaatctaaacaaagt

SEQ ID NO: 62086 - DNA, 20 bp, Artificial Sequence
  chemically synthesized
ctatggaacatcaaaaaaag

SEQ ID NO: 62087 - DNA, 20 bp, Artificial Sequence
  chemically synthesized
catatattcctatggaacat

SEQ ID NO: 62088 - DNA, 20 bp, Artificial Sequence
  chemically synthesized
ttacatatattcctatggaa

SEQ ID NO: 62089 - DNA, 20 bp, Artificial Sequence
  chemically synthesized
cttacatatattcctatgga

SEQ ID NO: 62090 - DNA, 20 bp, Artificial Sequence
  chemically synthesized
tttcttacatatattcctat

SEQ ID NO: 62091 - DNA, 20 bp, Artificial Sequence
  chemically synthesized
cagctcttatttcttacata

SEQ ID NO: 62092 - DNA, 20 bp, Artificial Sequence
  chemically synthesized
acagctcttatttcttacat

SEQ ID NO: 62093 - DNA, 20 bp, Artificial Sequence
  chemically synthesized
tacagctcttatttcttaca

SEQ ID NO: 62094 - DNA, 20 bp, Artificial Sequence
  chemically synthesized
ttacagctcttatttcttac

SEQ ID NO: 62095 - DNA, 20 bp, Artificial Sequence
  chemically synthesized
tttacagctcttatttctta

SEQ ID NO: 62096 - DNA, 20 bp, Artificial Sequence
  chemically synthesized
atcaatattttttacagctc

SEQ ID NO: 62097 - DNA, 20 bp, Artificial Sequence
  chemically synthesized
aatcaatattttttacagct

SEQ ID NO: 62098 - DNA, 20 bp, Artificial Sequence
  chemically synthesized
taatcaatattttttacagc

SEQ ID NO: 62099 - DNA, 20 bp, Artificial Sequence
  chemically synthesized
ttaatcaatattttttacag

SEQ ID NO: 62100 - DNA, 20 bp, Artificial Sequence
  chemically synthesized
tttaatcaatattttttaca

SEQ ID NO: 62101 - DNA, 20 bp, Artificial Sequence
  chemically synthesized
ttttaatcaatattttttac

SEQ ID NO: 62102 - DNA, 20 bp, Artificial Sequence
  chemically synthesized
acactttttttaatcaatat

SEQ ID NO: 62103 - DNA, 20 bp, Artificial Sequence
  chemically synthesized
aacactttttttaatcaata

SEQ ID NO: 62104 - DNA, 20 bp, Artificial Sequence
  chemically synthesized
tttaacactttttttaatca

SEQ ID NO: 62105 - DNA, 20 bp, Artificial Sequence
  chemically synthesized
ctttaacactttttttaatc

SEQ ID NO: 62106 - DNA, 20 bp, Artificial Sequence
  chemically synthesized
tctttaacactttttttaat

SEQ ID NO: 62107 - DNA, 20 bp, Artificial Sequence
  chemically synthesized
tcattttctttaacactttt

SEQ ID NO: 62108 - DNA, 20 bp, Artificial Sequence
  chemically synthesized
tactatgttatcattttctt

SEQ ID NO: 62109 - DNA, 20 bp, Artificial Sequence
  chemically synthesized
atactatgttatcattttct

SEQ ID NO: 62110 - DNA, 20 bp, Artificial Sequence
  chemically synthesized
tgtatataaccctttatact

SEQ ID NO: 62111 - DNA, 20 bp, Artificial Sequence
  chemically synthesized
cccatcaagtatatgtgata

SEQ ID NO: 62112 - DNA, 20 bp, Artificial Sequence
  chemically synthesized
cgttacccatcaagtatatg

SEQ ID NO: 62113 - DNA, 20 bp, Artificial Sequence
  chemically synthesized
cctataaaaatccattacgt

SEQ ID NO: 62114 - DNA, 20 bp, Artificial Sequence
  chemically synthesized
accagccaaaattacctata

SEQ ID NO: 62115 - DNA, 20 bp, Artificial Sequence
  chemically synthesized
gggttcaccagccaaaatta

SEQ ID NO: 62116 - DNA, 20 bp, Artificial Sequence
  chemically synthesized
ttagggttcaccagccaaaa

SEQ ID NO: 62117 - DNA, 20 bp, Artificial Sequence
  chemically synthesized
accactcttgttagggttca

SEQ ID NO: 62118 - DNA, 20 bp, Artificial Sequence
  chemically synthesized
ttaaccactcttgttagggt

SEQ ID NO: 62119 - DNA, 20 bp, Artificial Sequence
  chemically synthesized
cttaaccactcttgttaggg

SEQ ID NO: 62120 - DNA, 20 bp, Artificial Sequence
  chemically synthesized
tcttaaccactcttgttagg

SEQ ID NO: 62121 - DNA, 20 bp, Artificial Sequence
  chemically synthesized
ttttcttaaccactcttgtt

SEQ ID NO: 62122 - DNA, 20 bp, Artificial Sequence
  chemically synthesized
gttttcttaaccactcttgt

SEQ ID NO: 62123 - DNA, 20 bp, Artificial Sequence
  chemically synthesized
tgttttcttaaccactcttg

SEQ ID NO: 62124 - DNA, 20 bp, Artificial Sequence
  chemically synthesized
tatattttgttttcttaacc

SEQ ID NO: 62125 - DNA, 20 bp, Artificial Sequence
  chemically synthesized
atatattttgttttcttaac

SEQ ID NO: 62126 - DNA, 20 bp, Artificial Sequence
  chemically synthesized
gtaatttatatattttgttt

SEQ ID NO: 62127 - DNA, 20 bp, Artificial Sequence
  chemically synthesized
cagatattagtaatttatat

SEQ ID NO: 62128 - DNA, 20 bp, Artificial Sequence
  chemically synthesized
cattccagatattagtaatt

SEQ ID NO: 62129 - DNA, 20 bp, Artificial Sequence
  chemically synthesized
tatagtgatatctcctctta

SEQ ID NO: 62130 - DNA, 20 bp, Artificial Sequence
  chemically synthesized
acatctgcatgttctatagt

SEQ ID NO: 62131 - DNA, 20 bp, Artificial Sequence
  chemically synthesized
aacatctgcatgttctatag

SEQ ID NO: 62132 - DNA, 20 bp, Artificial Sequence
  chemically synthesized
taacatctgcatgttctata

SEQ ID NO: 62133 - DNA, 20 bp, Artificial Sequence
  chemically synthesized
tacttttaacatctgcatgt

SEQ ID NO: 62134 - DNA, 20 bp, Artificial Sequence
  chemically synthesized
ttatacttttaacatctgca

SEQ ID NO: 62135 - DNA, 20 bp, Artificial Sequence
  chemically synthesized
cttattatacttttaacatc

SEQ ID NO: 62136 - DNA, 20 bp, Artificial Sequence
  chemically synthesized
ccttattatacttttaacat

SEQ ID NO: 62137 - DNA, 20 bp, Artificial Sequence
  chemically synthesized
aaatttccttattatacttt

SEQ ID NO: 62138 - DNA, 20 bp, Artificial Sequence
  chemically synthesized
aaaatttccttattatactt

SEQ ID NO: 62139 - DNA, 20 bp, Artificial Sequence
  chemically synthesized
aaatagcatttaaaatttcc

SEQ ID NO: 62140 - DNA, 20 bp, Artificial Sequence
  chemically synthesized
tatacattaaaatagcattt

SEQ ID NO: 62141 - DNA, 20 bp, Artificial Sequence
  chemically synthesized
ttatatacattaaaatagca

SEQ ID NO: 62142 - DNA, 20 bp, Artificial Sequence
  chemically synthesized
catctaagttattatataca

SEQ ID NO: 62143 - DNA, 20 bp, Artificial Sequence
  chemically synthesized
attacatctaagttattata

SEQ ID NO: 62144 - DNA, 20 bp, Artificial Sequence
  chemically synthesized
cattacatctaagttattat

SEQ ID NO: 62145 - DNA, 20 bp, Artificial Sequence
  chemically synthesized
tcattacatctaagttatta

SEQ ID NO: 62146 - DNA, 20 bp, Artificial Sequence
  chemically synthesized
taaaaacattttcattacat

SEQ ID NO: 62147 - DNA, 20 bp, Artificial Sequence
  chemically synthesized
ataaaaacattttcattaca

SEQ ID NO: 62148 - DNA, 20 bp, Artificial Sequence
  chemically synthesized
tgtttataaaaacattttca

SEQ ID NO: 62149 - DNA, 20 bp, Artificial Sequence
  chemically synthesized
gtgtttataaaaacattttc

SEQ ID NO: 62150 - DNA, 20 bp, Artificial Sequence
  chemically synthesized
ctaatttgtgtttataaaaa

SEQ ID NO: 62151 - DNA, 20 bp, Artificial Sequence
  chemically synthesized
actaatttgtgtttataaaa

SEQ ID NO: 62152 - DNA, 20 bp, Artificial Sequence
  chemically synthesized
tatgtgggtcagatttacta

SEQ ID NO: 62153 - DNA, 20 bp, Artificial Sequence
  chemically synthesized
ctatgtgggtcagatttact

SEQ ID NO: 62154 - DNA, 20 bp, Artificial Sequence
  chemically synthesized
catttctatgtgggtcagat

SEQ ID NO: 62155 - DNA, 20 bp, Artificial Sequence
  chemically synthesized
aaatattccatttctatgtg

SEQ ID NO: 62156 - DNA, 20 bp, Artificial Sequence
  chemically synthesized
agagaaatataactgttgaa

SEQ ID NO: 62157 - DNA, 20 bp, Artificial Sequence
  chemically synthesized
gagagaaatataactgttga

SEQ ID NO: 62158 - DNA, 20 bp, Artificial Sequence
  chemically synthesized
tttgagagaaatataactgt

SEQ ID NO: 62159 - DNA, 20 bp, Artificial Sequence
  chemically synthesized
ctttgagagaaatataactg

SEQ ID NO: 62160 - DNA, 20 bp, Artificial Sequence
  chemically synthesized
atttctttgagagaaatata

SEQ ID NO: 62161 - DNA, 20 bp, Artificial Sequence
  chemically synthesized
aatttctttgagagaaatat

SEQ ID NO: 62162 - DNA, 20 bp, Artificial Sequence
  chemically synthesized
ataataagtttaatttcttt

SEQ ID NO: 62163 - DNA, 20 bp, Artificial Sequence
  chemically synthesized
ttgataataagtttaatttc

SEQ ID NO: 62164 - DNA, 20 bp, Artificial Sequence
  chemically synthesized
attgataataagtttaattt

SEQ ID NO: 62165 - DNA, 20 bp, Artificial Sequence
  chemically synthesized
gggggaagtttattgataat

SEQ ID NO: 62166 - DNA, 20 bp, Artificial Sequence
  chemically synthesized
ggggggaagtttattgataa

SEQ ID NO: 62167 - DNA, 20 bp, Artificial Sequence
  chemically synthesized
tttggggggaagtttattga

SEQ ID NO: 62168 - DNA, 20 bp, Artificial Sequence
  chemically synthesized
ctttggggggaagtttattg

SEQ ID NO: 62169 - DNA, 20 bp, Artificial Sequence
  chemically synthesized
tctttggggggaagtttatt

SEQ ID NO: 62170 - DNA, 20 bp, Artificial Sequence
  chemically synthesized
ccagaatataaccatcaagc

SEQ ID NO: 62171 - DNA, 20 bp, Artificial Sequence
  chemically synthesized
accagaatataaccatcaag

SEQ ID NO: 62172 - DNA, 20 bp, Artificial Sequence
  chemically synthesized
atagaatttaccagaatata

SEQ ID NO: 62173 - DNA, 20 bp, Artificial Sequence
  chemically synthesized
gatagaatttaccagaatat

SEQ ID NO: 62174 - DNA, 20 bp, Artificial Sequence
  chemically synthesized
tacatttgatagaatttacc

SEQ ID NO: 62175 - DNA, 20 bp, Artificial Sequence
  chemically synthesized
cttatacatttgatagaatt

SEQ ID NO: 62176 - DNA, 20 bp, Artificial Sequence
  chemically synthesized
ccttatacatttgatagaat

SEQ ID NO: 62177 - DNA, 20 bp, Artificial Sequence
  chemically synthesized
tttccttatacatttgatag

SEQ ID NO: 62178 - DNA, 20 bp, Artificial Sequence
  chemically synthesized
ctttccttatacatttgata

SEQ ID NO: 62179 - DNA, 20 bp, Artificial Sequence
  chemically synthesized
acactatttctttccttata

SEQ ID NO: 62180 - DNA, 20 bp, Artificial Sequence
  chemically synthesized
tgtcagattgacactatttc

SEQ ID NO: 62181 - DNA, 20 bp, Artificial Sequence
  chemically synthesized
gtgtcagattgacactattt

SEQ ID NO: 62182 - DNA, 20 bp, Artificial Sequence
  chemically synthesized
taaaataatttgtgtcagat

SEQ ID NO: 62183 - DNA, 20 bp, Artificial Sequence
  chemically synthesized
ctaaaataatttgtgtcaga

SEQ ID NO: 62184 - DNA, 20 bp, Artificial Sequence
  chemically synthesized
cagtttctaaaataatttgt

SEQ ID NO: 62185 - DNA, 20 bp, Artificial Sequence
  chemically synthesized
ctcttccagtttctaaaata

SEQ ID NO: 62186 - DNA, 20 bp, Artificial Sequence
  chemically synthesized
agaagggtcattcctcttcc

SEQ ID NO: 62187 - DNA, 20 bp, Artificial Sequence
  chemically synthesized
aaaaaataggttgagaaggg

SEQ ID NO: 62188 - DNA, 20 bp, Artificial Sequence
  chemically synthesized
agctagcttcaaaaaatagg

SEQ ID NO: 62189 - DNA, 20 bp, Artificial Sequence
  chemically synthesized
ggtaccaggattaagctagc

SEQ ID NO: 62190 - DNA, 20 bp, Artificial Sequence
  chemically synthesized
gggtaccaggattaagctag

SEQ ID NO: 62191 - DNA, 20 bp, Artificial Sequence
  chemically synthesized
gccaggtttgggtaccagga

SEQ ID NO: 62192 - DNA, 20 bp, Artificial Sequence
  chemically synthesized
ggccaggtttgggtaccagg

SEQ ID NO: 62193 - DNA, 20 bp, Artificial Sequence
  chemically synthesized
tggccaggtttgggtaccag

SEQ ID NO: 62194 - DNA, 20 bp, Artificial Sequence
  chemically synthesized
tctaatattttggccaggtt

SEQ ID NO: 62195 - DNA, 20 bp, Artificial Sequence
  chemically synthesized
ctctaatattttggccaggt

SEQ ID NO: 62196 - DNA, 20 bp, Artificial Sequence
  chemically synthesized
tctctaatattttggccagg

SEQ ID NO: 62197 - DNA, 20 bp, Artificial Sequence
  chemically synthesized
ttttctctaatattttggcc

SEQ ID NO: 62198 - DNA, 20 bp, Artificial Sequence
  chemically synthesized
tctatcaacttcttttctct

SEQ ID NO: 62199 - DNA, 20 bp, Artificial Sequence
  chemically synthesized
gtctatcaacttcttttctc

SEQ ID NO: 62200 - DNA, 20 bp, Artificial Sequence
  chemically synthesized
agggatatttgtctatcaac

SEQ ID NO: 62201 - DNA, 20 bp, Artificial Sequence
  chemically synthesized
gagggatatttgtctatcaa

SEQ ID NO: 62202 - DNA, 20 bp, Artificial Sequence
  chemically synthesized
tgagggatatttgtctatca

SEQ ID NO: 62203 - DNA, 20 bp, Artificial Sequence
  chemically synthesized
ttgagggatatttgtctatc

SEQ ID NO: 62204 - DNA, 20 bp, Artificial Sequence
  chemically synthesized
tacatttttgagggatattt

SEQ ID NO: 62205 - DNA, 20 bp, Artificial Sequence
  chemically synthesized
cttatacatttttgagggat

SEQ ID NO: 62206 - DNA, 20 bp, Artificial Sequence
  chemically synthesized
gcttatacatttttgaggga

SEQ ID NO: 62207 - DNA, 20 bp, Artificial Sequence
  chemically synthesized
tgaaagtttgcttatacatt

SEQ ID NO: 62208 - DNA, 20 bp, Artificial Sequence
  chemically synthesized
ttgtgaaagtttgcttatac

SEQ ID NO: 62209 - DNA, 20 bp, Artificial Sequence
  chemically synthesized
cttgtgaaagtttgcttata

SEQ ID NO: 62210 - DNA, 20 bp, Artificial Sequence
  chemically synthesized
tcttgtgaaagtttgcttat

SEQ ID NO: 62211 - DNA, 20 bp, Artificial Sequence
  chemically synthesized
gtattttcttgtgaaagttt

SEQ ID NO: 62212 - DNA, 20 bp, Artificial Sequence
  chemically synthesized
gtgtgttagtattttcttgt

SEQ ID NO: 62213 - DNA, 20 bp, Artificial Sequence
  chemically synthesized
aaattagtgtgttagtattt

SEQ ID NO: 62214 - DNA, 20 bp, Artificial Sequence
  chemically synthesized
tgtattaaaattagtgtgtt

SEQ ID NO: 62215 - DNA, 20 bp, Artificial Sequence
  chemically synthesized
taattatgtattaaaattag

SEQ ID NO: 62216 - DNA, 20 bp, Artificial Sequence
  chemically synthesized
ataattatgtattaaaatta

SEQ ID NO: 62217 - DNA, 20 bp, Artificial Sequence
  chemically synthesized
ctgagatgtgccctacttta

SEQ ID NO: 62218 - DNA, 20 bp, Artificial Sequence
  chemically synthesized
cctgagatgtgccctacttt

SEQ ID NO: 62219 - DNA, 20 bp, Artificial Sequence
  chemically synthesized
gtttcctgagatgtgcccta

SEQ ID NO: 62220 - DNA, 20 bp, Artificial Sequence
  chemically synthesized
ggtttcctgagatgtgccct

SEQ ID NO: 62221 - DNA, 20 bp, Artificial Sequence
  chemically synthesized
acctgctttggtttcctgag

SEQ ID NO: 62222 - DNA, 20 bp, Artificial Sequence
  chemically synthesized
aacctgctttggtttcctga

SEQ ID NO: 62223 - DNA, 20 bp, Artificial Sequence
  chemically synthesized
aatctttaacctgctttggt

SEQ ID NO: 62224 - DNA, 20 bp, Artificial Sequence
  chemically synthesized
gaatctttaacctgctttgg

SEQ ID NO: 62225 - DNA, 20 bp, Artificial Sequence
  chemically synthesized
tgaatctttaacctgctttg

SEQ ID NO: 62226 - DNA, 20 bp, Artificial Sequence
  chemically synthesized
ttgaatctttaacctgcttt

SEQ ID NO: 62227 - DNA, 20 bp, Artificial Sequence
  chemically synthesized
atttttgaatctttaacctg

SEQ ID NO: 62228 - DNA, 20 bp, Artificial Sequence
  chemically synthesized
attaatttttgaatctttaa

SEQ ID NO: 62229 - DNA, 20 bp, Artificial Sequence
  chemically synthesized
tattgattaatttttgaatc

SEQ ID NO: 62230 - DNA, 20 bp, Artificial Sequence
  chemically synthesized
acatggcaaattatattgat

SEQ ID NO: 62231 - DNA, 20 bp, Artificial Sequence
  chemically synthesized
tagtctgttaacatggcaaa

SEQ ID NO: 62232 - DNA, 20 bp, Artificial Sequence
  chemically synthesized
tgtcttctagtctgttaaca

SEQ ID NO: 62233 - DNA, 20 bp, Artificial Sequence
  chemically synthesized
atgtcttctagtctgttaac

SEQ ID NO: 62234 - DNA, 20 bp, Artificial Sequence
  chemically synthesized
tttatgtcttctagtctgtt

SEQ ID NO: 62235 - DNA, 20 bp, Artificial Sequence
  chemically synthesized
taaccaggttatttatgtct

SEQ ID NO: 62236 - DNA, 20 bp, Artificial Sequence
  chemically synthesized
attataaccaggttatttat

SEQ ID NO: 62237 - DNA, 20 bp, Artificial Sequence
  chemically synthesized
attgattataaccaggttat

SEQ ID NO: 62238 - DNA, 20 bp, Artificial Sequence
  chemically synthesized
aatgcattgattgattataa

SEQ ID NO: 62239 - DNA, 20 bp, Artificial Sequence
  chemically synthesized
gaatgcattgattgattata

SEQ ID NO: 62240 - DNA, 20 bp, Artificial Sequence
  chemically synthesized
tgctttgaatgcattgattg

SEQ ID NO: 62241 - DNA, 20 bp, Artificial Sequence
  chemically synthesized
aattatgctttgaatgcatt

SEQ ID NO: 62242 - DNA, 20 bp, Artificial Sequence
  chemically synthesized
ttaaattatgctttgaatgc

SEQ ID NO: 62243 - DNA, 20 bp, Artificial Sequence
  chemically synthesized
atgttattaaattatgcttt

SEQ ID NO: 62244 - DNA, 20 bp, Artificial Sequence
  chemically synthesized
acatgaatagatgcattcat

SEQ ID NO: 62245 - DNA, 20 bp, Artificial Sequence
  chemically synthesized
aacatgaatagatgcattca

SEQ ID NO: 62246 - DNA, 20 bp, Artificial Sequence
  chemically synthesized
taacatgaatagatgcattc

SEQ ID NO: 62247 - DNA, 20 bp, Artificial Sequence
  chemically synthesized
ttaacatgaatagatgcatt

SEQ ID NO: 62248 - DNA, 20 bp, Artificial Sequence
  chemically synthesized
ctgtgagtttttaacatgaa

SEQ ID NO: 62249 - DNA, 20 bp, Artificial Sequence
  chemically synthesized
gctgtgagtttttaacatga

SEQ ID NO: 62250 - DNA, 20 bp, Artificial Sequence
  chemically synthesized
tttgctgtgagtttttaaca

SEQ ID NO: 62251 - DNA, 20 bp, Artificial Sequence
  chemically synthesized
ttatttgctgtgagttttta

SEQ ID NO: 62252 - DNA, 20 bp, Artificial Sequence
  chemically synthesized
cttatttgctgtgagttttt

SEQ ID NO: 62253 - DNA, 20 bp, Artificial Sequence
  chemically synthesized
tatttcttatttgctgtgag

SEQ ID NO: 62254 - DNA, 20 bp, Artificial Sequence
  chemically synthesized
ctatttcttatttgctgtga

SEQ ID NO: 62255 - DNA, 20 bp, Artificial Sequence
  chemically synthesized
aggaagtgtctttctatttc

SEQ ID NO: 62256 - DNA, 20 bp, Artificial Sequence
  chemically synthesized
tcagattgaggaagtgtctt

SEQ ID NO: 62257 - DNA, 20 bp, Artificial Sequence
  chemically synthesized
atcagattgaggaagtgtct

SEQ ID NO: 62258 - DNA, 20 bp, Artificial Sequence
  chemically synthesized
taaatgctctttatcagatt

SEQ ID NO: 62259 - DNA, 20 bp, Artificial Sequence
  chemically synthesized
gtaaatgctctttatcagat

SEQ ID NO: 62260 - DNA, 20 bp, Artificial Sequence
  chemically synthesized
tgtaaatgctctttatcaga

SEQ ID NO: 62261 - DNA, 20 bp, Artificial Sequence
  chemically synthesized
actataggcttttgtaaatg

SEQ ID NO: 62262 - DNA, 20 bp, Artificial Sequence
  chemically synthesized
agcactaaatatgatattaa

SEQ ID NO: 62263 - DNA, 20 bp, Artificial Sequence
  chemically synthesized
cagcactaaatatgatatta

SEQ ID NO: 62264 - DNA, 20 bp, Artificial Sequence
  chemically synthesized
acaatttcagcactaaatat

SEQ ID NO: 62265 - DNA, 20 bp, Artificial Sequence
  chemically synthesized
atgttcacaatttcagcact

SEQ ID NO: 62266 - DNA, 20 bp, Artificial Sequence
  chemically synthesized
gggaaacaattcatgttcac

SEQ ID NO: 62267 - DNA, 20 bp, Artificial Sequence
  chemically synthesized
ctgtcgtgtcctggtcttag

SEQ ID NO: 62268 - DNA, 20 bp, Artificial Sequence
  chemically synthesized
gctaaaacctcctgtacacc

SEQ ID NO: 62269 - DNA, 20 bp, Artificial Sequence
  chemically synthesized
tgcattggctaaaacctcct

SEQ ID NO: 62270 - DNA, 20 bp, Artificial Sequence
  chemically synthesized
tcttatgcattggctaaaac

SEQ ID NO: 62271 - DNA, 20 bp, Artificial Sequence
  chemically synthesized
tcttgtcttatgcattggct

SEQ ID NO: 62272 - DNA, 20 bp, Artificial Sequence
  chemically synthesized
ctcttgtcttatgcattggc

SEQ ID NO: 62273 - DNA, 20 bp, Artificial Sequence
  chemically synthesized
tttctcttgtcttatgcatt

SEQ ID NO: 62274 - DNA, 20 bp, Artificial Sequence
  chemically synthesized
gtttctcttgtcttatgcat

SEQ ID NO: 62275 - DNA, 20 bp, Artificial Sequence
  chemically synthesized
tttgtttctcttgtcttatg

SEQ ID NO: 62276 - DNA, 20 bp, Artificial Sequence
  chemically synthesized
atttgtttctcttgtcttat

SEQ ID NO: 62277 - DNA, 20 bp, Artificial Sequence
  chemically synthesized
tgtttatttgtttctcttgt

SEQ ID NO: 62278 - DNA, 20 bp, Artificial Sequence
  chemically synthesized
tgcagccaaaagacacatga

SEQ ID NO: 62279 - DNA, 20 bp, Artificial Sequence
  chemically synthesized
atgcagccaaaagacacatg

SEQ ID NO: 62280 - DNA, 20 bp, Artificial Sequence
  chemically synthesized
tcaaaagaagacatttatgc

SEQ ID NO: 62281 - DNA, 20 bp, Artificial Sequence
  chemically synthesized
caagaaaaaaacaaacaacc

SEQ ID NO: 62282 - DNA, 20 bp, Artificial Sequence
  chemically synthesized
acaagaaaaaaacaaacaac

SEQ ID NO: 62283 - DNA, 20 bp, Artificial Sequence
  chemically synthesized
atggctaatatccagaatct

SEQ ID NO: 62284 - DNA, 20 bp, Artificial Sequence
  chemically synthesized
tctgatggccattgatggct

SEQ ID NO: 62285 - DNA, 20 bp, Artificial Sequence
  chemically synthesized
ctctgatggccattgatggc

SEQ ID NO: 62286 - DNA, 20 bp, Artificial Sequence
  chemically synthesized
catttctctgatggccattg

SEQ ID NO: 62287 - DNA, 20 bp, Artificial Sequence
  chemically synthesized
gcatttctctgatggccatt

SEQ ID NO: 62288 - DNA, 20 bp, Artificial Sequence
  chemically synthesized
atttgcatttctctgatggc

SEQ ID NO: 62289 - DNA, 20 bp, Artificial Sequence
  chemically synthesized
gatttgcatttctctgatgg

SEQ ID NO: 62290 - DNA, 20 bp, Artificial Sequence
  chemically synthesized
tgatttgcatttctctgatg

SEQ ID NO: 62291 - DNA, 20 bp, Artificial Sequence
  chemically synthesized
tggttttgatttgcatttct

SEQ ID NO: 62292 - DNA, 20 bp, Artificial Sequence
  chemically synthesized
taactggtgtgagatggtat

SEQ ID NO: 62293 - DNA, 20 bp, Artificial Sequence
  chemically synthesized
atgatcaccattctaactgg

SEQ ID NO: 62294 - DNA, 20 bp, Artificial Sequence
  chemically synthesized
aatgatcaccattctaactg

SEQ ID NO: 62295 - DNA, 20 bp, Artificial Sequence
  chemically synthesized
taatgatcaccattctaact

SEQ ID NO: 62296 - DNA, 20 bp, Artificial Sequence
  chemically synthesized
ttaatgatcaccattctaac

SEQ ID NO: 62297 - DNA, 20 bp, Artificial Sequence
  chemically synthesized
ctgactttttaatgatcacc

SEQ ID NO: 62298 - DNA, 20 bp, Artificial Sequence
  chemically synthesized
cctgactttttaatgatcac

SEQ ID NO: 62299 - DNA, 20 bp, Artificial Sequence
  chemically synthesized
tttcctgactttttaatgat

SEQ ID NO: 62300 - DNA, 20 bp, Artificial Sequence
  chemically synthesized
gtttcctgactttttaatga

SEQ ID NO: 62301 - DNA, 20 bp, Artificial Sequence
  chemically synthesized
tgtttcctgactttttaatg

SEQ ID NO: 62302 - DNA, 20 bp, Artificial Sequence
  chemically synthesized
cctccagcaccttttgtttc

SEQ ID NO: 62303 - DNA, 20 bp, Artificial Sequence
  chemically synthesized
tccacattccctccagcacc

SEQ ID NO: 62304 - DNA, 20 bp, Artificial Sequence
  chemically synthesized
ctccacattccctccagcac

SEQ ID NO: 62305 - DNA, 20 bp, Artificial Sequence
  chemically synthesized
ctatttctccacattccctc

SEQ ID NO: 62306 - DNA, 20 bp, Artificial Sequence
  chemically synthesized
cagtcccaccaacagtgtaa

SEQ ID NO: 62307 - DNA, 20 bp, Artificial Sequence
  chemically synthesized
acagtcccaccaacagtgta

SEQ ID NO: 62308 - DNA, 20 bp, Artificial Sequence
  chemically synthesized
aactagtttacagtcccacc

SEQ ID NO: 62309 - DNA, 20 bp, Artificial Sequence
  chemically synthesized
cacaatggttgaactagttt

SEQ ID NO: 62310 - DNA, 20 bp, Artificial Sequence
  chemically synthesized
aggactcgccacactgtctt

SEQ ID NO: 62311 - DNA, 20 bp, Artificial Sequence
  chemically synthesized
tagctctggatccttgagga

SEQ ID NO: 62312 - DNA, 20 bp, Artificial Sequence
  chemically synthesized
ctagctctggatccttgagg

SEQ ID NO: 62313 - DNA, 20 bp, Artificial Sequence
  chemically synthesized
ggtatatacccagtaatggg

SEQ ID NO: 62314 - DNA, 20 bp, Artificial Sequence
  chemically synthesized
gggtatatacccagtaatgg

SEQ ID NO: 62315 - DNA, 20 bp, Artificial Sequence
  chemically synthesized
tactcctttgggtatatacc

SEQ ID NO: 62316 - DNA, 20 bp, Artificial Sequence
  chemically synthesized
atactcctttgggtatatac

SEQ ID NO: 62317 - DNA, 20 bp, Artificial Sequence
  chemically synthesized
tagcagcatgatttatactc

SEQ ID NO: 62318 - DNA, 20 bp, Artificial Sequence
  chemically synthesized
atagcagcatgatttatact

SEQ ID NO: 62319 - DNA, 20 bp, Artificial Sequence
  chemically synthesized
tgaatagtgctgcaataatc

SEQ ID NO: 62320 - DNA, 20 bp, Artificial Sequence
  chemically synthesized
ctattgtgaatagtgctgca

SEQ ID NO: 62321 - DNA, 20 bp, Artificial Sequence
  chemically synthesized
gctattgtgaatagtgctgc

SEQ ID NO: 62322 - DNA, 20 bp, Artificial Sequence
  chemically synthesized
caagtctttgctattgtgaa

SEQ ID NO: 62323 - DNA, 20 bp, Artificial Sequence
  chemically synthesized
gttccaagtctttgctattg

SEQ ID NO: 62324 - DNA, 20 bp, Artificial Sequence
  chemically synthesized
gcttggttccaagtctttgc

SEQ ID NO: 62325 - DNA, 20 bp, Artificial Sequence
  chemically synthesized
ggcttggttccaagtctttg

SEQ ID NO: 62326 - DNA, 20 bp, Artificial Sequence
  chemically synthesized
atggacatttggcttggttc

SEQ ID NO: 62327 - DNA, 20 bp, Artificial Sequence
  chemically synthesized
atccagtctatcattgatgg

SEQ ID NO: 62328 - DNA, 20 bp, Artificial Sequence
  chemically synthesized
ttaatccagtctatcattga

SEQ ID NO: 62329 - DNA, 20 bp, Artificial Sequence
  chemically synthesized
cttaatccagtctatcattg

SEQ ID NO: 62330 - DNA, 20 bp, Artificial Sequence
  chemically synthesized
tcttaatccagtctatcatt

SEQ ID NO: 62331 - DNA, 20 bp, Artificial Sequence
  chemically synthesized
catggtgtatatgtgccaca

SEQ ID NO: 62332 - DNA, 20 bp, Artificial Sequence
  chemically synthesized
tggctgcatagtattccatg

SEQ ID NO: 62333 - DNA, 20 bp, Artificial Sequence
  chemically synthesized
atggctgcatagtattccat

SEQ ID NO: 62334 - DNA, 20 bp, Artificial Sequence
  chemically synthesized
tatggctgcatagtattcca

SEQ ID NO: 62335 - DNA, 20 bp, Artificial Sequence
  chemically synthesized
ttatggctgcatagtattcc

SEQ ID NO: 62336 - DNA, 20 bp, Artificial Sequence
  chemically synthesized
tttatggctgcatagtattc

SEQ ID NO: 62337 - DNA, 20 bp, Artificial Sequence
  chemically synthesized
atccatgtccctataaagga

SEQ ID NO: 62338 - DNA, 20 bp, Artificial Sequence
  chemically synthesized
cagcttcatccatgtcccta

SEQ ID NO: 62339 - DNA, 20 bp, Artificial Sequence
  chemically synthesized
ccagcttcatccatgtccct

SEQ ID NO: 62340 - DNA, 20 bp, Artificial Sequence
  chemically synthesized
ctgagaatgatggtttccag

SEQ ID NO: 62341 - DNA, 20 bp, Artificial Sequence
  chemically synthesized
gctgagaatgatggtttcca

SEQ ID NO: 62342 - DNA, 20 bp, Artificial Sequence
  chemically synthesized
tgatagtttgctgagaatga

SEQ ID NO: 62343 - DNA, 20 bp, Artificial Sequence
  chemically synthesized
tccttgtgatagtttgctga

SEQ ID NO: 62344 - DNA, 20 bp, Artificial Sequence
  chemically synthesized
gtccttgtgatagtttgctg

SEQ ID NO: 62345 - DNA, 20 bp, Artificial Sequence
  chemically synthesized
tgtccttgtgatagtttgct

SEQ ID NO: 62346 - DNA, 20 bp, Artificial Sequence
  chemically synthesized
ttgtccttgtgatagtttgc

SEQ ID NO: 62347 - DNA, 20 bp, Artificial Sequence
  chemically synthesized
tttgtccttgtgatagtttg

SEQ ID NO: 62348 - DNA, 20 bp, Artificial Sequence
  chemically synthesized
attttttgtccttgtgatag

SEQ ID NO: 62349 - DNA, 20 bp, Artificial Sequence
  chemically synthesized
gattttttgtccttgtgata

SEQ ID NO: 62350 - DNA, 20 bp, Artificial Sequence
  chemically synthesized
ccatctatgagtgagaacat

SEQ ID NO: 62351 - DNA, 20 bp, Artificial Sequence
  chemically synthesized
aattcccatctatgagtgag

SEQ ID NO: 62352 - DNA, 20 bp, Artificial Sequence
  chemically synthesized
tcgttcaattcccatctatg

SEQ ID NO: 62353 - DNA, 20 bp, Artificial Sequence
  chemically synthesized
ctgtgtccaagtgctcttat

SEQ ID NO: 62354 - DNA, 20 bp, Artificial Sequence
  chemically synthesized
cccttcctgtgtccaagtgc

SEQ ID NO: 62355 - DNA, 20 bp, Artificial Sequence
  chemically synthesized
cacctatgactggccctggt

SEQ ID NO: 62356 - DNA, 20 bp, Artificial Sequence
  chemically synthesized
ggtatatctcctaatgctat

SEQ ID NO: 62357 - DNA, 20 bp, Artificial Sequence
  chemically synthesized
cattaggtatatctcctaat

SEQ ID NO: 62358 - DNA, 20 bp, Artificial Sequence
  chemically synthesized
acattaggtatatctcctaa

SEQ ID NO: 62359 - DNA, 20 bp, Artificial Sequence
  chemically synthesized
actcgtcatttacattaggt

SEQ ID NO: 62360 - DNA, 20 bp, Artificial Sequence
  chemically synthesized
gtgtgctgcaccgattaact

SEQ ID NO: 62361 - DNA, 20 bp, Artificial Sequence
  chemically synthesized
catatgtatacatgtgccat

SEQ ID NO: 62362 - DNA, 20 bp, Artificial Sequence
  chemically synthesized
ttacatatgtatacatgtgc

SEQ ID NO: 62363 - DNA, 20 bp, Artificial Sequence
  chemically synthesized
gttacatatgtatacatgtg

SEQ ID NO: 62364 - DNA, 20 bp, Artificial Sequence
  chemically synthesized
tagggtacatgtgcacaacg

SEQ ID NO: 62365 - DNA, 20 bp, Artificial Sequence
  chemically synthesized
agttctagggtacatgtgca

SEQ ID NO: 62366 - DNA, 20 bp, Artificial Sequence
  chemically synthesized
aagttctagggtacatgtgc

SEQ ID NO: 62367 - DNA, 20 bp, Artificial Sequence
  chemically synthesized
tactttaagttctagggtac

SEQ ID NO: 62368 - DNA, 20 bp, Artificial Sequence
  chemically synthesized
ttatactttaagttctaggg

SEQ ID NO: 62369 - DNA, 20 bp, Artificial Sequence
  chemically synthesized
ttattatactttaagttcta

SEQ ID NO: 62370 - DNA, 20 bp, Artificial Sequence
  chemically synthesized
attattattatactttaagt

SEQ ID NO: 62371 - DNA, 20 bp, Artificial Sequence
  chemically synthesized
aattattattatactttaag

SEQ ID NO: 62372 - DNA, 20 bp, Artificial Sequence
  chemically synthesized
taattattattatactttaa

SEQ ID NO: 62373 - DNA, 20 bp, Artificial Sequence
  chemically synthesized
ttaattattattatacttta

SEQ ID NO: 62374 - DNA, 20 bp, Artificial Sequence
  chemically synthesized
tttaattattattatacttt

SEQ ID NO: 62375 - DNA, 20 bp, Artificial Sequence
  chemically synthesized
ttttaattattattatactt

SEQ ID NO: 62376 - DNA, 20 bp, Artificial Sequence
  chemically synthesized
gtttttttaattattattat

SEQ ID NO: 62377 - DNA, 20 bp, Artificial Sequence
  chemically synthesized
agtttttttaattattatta

SEQ ID NO: 62378 - DNA, 20 bp, Artificial Sequence
  chemically synthesized
tatttagtttttttaattat

SEQ ID NO: 62379 - DNA, 20 bp, Artificial Sequence
  chemically synthesized
atatttagtttttttaatta

SEQ ID NO: 62380 - DNA, 20 bp, Artificial Sequence
  chemically synthesized
gcctttatatttagtttttt

SEQ ID NO: 62381 - DNA, 20 bp, Artificial Sequence
  chemically synthesized
agcctttatatttagttttt

SEQ ID NO: 62382 - DNA, 20 bp, Artificial Sequence
  chemically synthesized
tagcctttatatttagtttt

SEQ ID NO: 62383 - DNA, 20 bp, Artificial Sequence
  chemically synthesized
tacagttttagcctttatat

SEQ ID NO: 62384 - DNA, 20 bp, Artificial Sequence
  chemically synthesized
aatgttctacagttttagcc

SEQ ID NO: 62385 - DNA, 20 bp, Artificial Sequence
  chemically synthesized
aaatgttctacagttttagc

SEQ ID NO: 62386 - DNA, 20 bp, Artificial Sequence
  chemically synthesized
taaatgttctacagttttag

SEQ ID NO: 62387 - DNA, 20 bp, Artificial Sequence
  chemically synthesized
ttttaaatgttctacagttt

SEQ ID NO: 62388 - DNA, 20 bp, Artificial Sequence
  chemically synthesized
cttttaaatgttctacagtt

SEQ ID NO: 62389 - DNA, 20 bp, Artificial Sequence
  chemically synthesized
tcttttaaatgttctacagt

SEQ ID NO: 62390 - DNA, 20 bp, Artificial Sequence
  chemically synthesized
tcatgttttcttttaaatgt

SEQ ID NO: 62391 - DNA, 20 bp, Artificial Sequence
  chemically synthesized
ctcatgttttcttttaaatg

SEQ ID NO: 62392 - DNA, 20 bp, Artificial Sequence
  chemically synthesized
tctcatgttttcttttaaat

SEQ ID NO: 62393 - DNA, 20 bp, Artificial Sequence
  chemically synthesized
ggaagatattttctcatgtt

SEQ ID NO: 62394 - DNA, 20 bp, Artificial Sequence
  chemically synthesized
cctactcccaaagttgggaa

SEQ ID NO: 62395 - DNA, 20 bp, Artificial Sequence
  chemically synthesized
gcctactcccaaagttggga

SEQ ID NO: 62396 - DNA, 20 bp, Artificial Sequence
  chemically synthesized
ctaagataactttgcctact

SEQ ID NO: 62397 - DNA, 20 bp, Artificial Sequence
  chemically synthesized
tatccttgctaagataactt

SEQ ID NO: 62398 - DNA, 20 bp, Artificial Sequence
  chemically synthesized
gtatccttgctaagataact

SEQ ID NO: 62399 - DNA, 20 bp, Artificial Sequence
  chemically synthesized
tgtatccttgctaagataac

SEQ ID NO: 62400 - DNA, 20 bp, Artificial Sequence
  chemically synthesized
ttgtatccttgctaagataa

SEQ ID NO: 62401 - DNA, 20 bp, Artificial Sequence
  chemically synthesized
tatgtagtgctttttgtatc

SEQ ID NO: 62402 - DNA, 20 bp, Artificial Sequence
  chemically synthesized
atatgtagtgctttttgtat

SEQ ID NO: 62403 - DNA, 20 bp, Artificial Sequence
  chemically synthesized
tatatgtagtgctttttgta

SEQ ID NO: 62404 - DNA, 20 bp, Artificial Sequence
  chemically synthesized
ttttatatgtagtgcttttt

SEQ ID NO: 62405 - DNA, 20 bp, Artificial Sequence
  chemically synthesized
cttttatatgtagtgctttt

SEQ ID NO: 62406 - DNA, 20 bp, Artificial Sequence
  chemically synthesized
tcttttatatgtagtgcttt

SEQ ID NO: 62407 - DNA, 20 bp, Artificial Sequence
  chemically synthesized
ttttcttttatatgtagtgc

SEQ ID NO: 62408 - DNA, 20 bp, Artificial Sequence
  chemically synthesized
attttcttttatatgtagtg

SEQ ID NO: 62409 - DNA, 20 bp, Artificial Sequence
  chemically synthesized
atggagtctaatatatcatt

SEQ ID NO: 62410 - DNA, 20 bp, Artificial Sequence
  chemically synthesized
gatggagtctaatatatcat

SEQ ID NO: 62411 - DNA, 20 bp, Artificial Sequence
  chemically synthesized
tgatggagtctaatatatca

SEQ ID NO: 62412 - DNA, 20 bp, Artificial Sequence
  chemically synthesized
ttttgatggagtctaatata

SEQ ID NO: 62413 - DNA, 20 bp, Artificial Sequence
  chemically synthesized
attttgatggagtctaatat

SEQ ID NO: 62414 - DNA, 20 bp, Artificial Sequence
  chemically synthesized
tattttgatggagtctaata

SEQ ID NO: 62415 - DNA, 20 bp, Artificial Sequence
  chemically synthesized
ttattttgatggagtctaat

SEQ ID NO: 62416 - DNA, 20 bp, Artificial Sequence
  chemically synthesized
tttattttgatggagtctaa

SEQ ID NO: 62417 - DNA, 20 bp, Artificial Sequence
  chemically synthesized
ttttattttgatggagtcta

SEQ ID NO: 62418 - DNA, 20 bp, Artificial Sequence
  chemically synthesized
tttttattttgatggagtct

SEQ ID NO: 62419 - DNA, 20 bp, Artificial Sequence
  chemically synthesized
ttttttattttgatggagtc

SEQ ID NO: 62420 - DNA, 20 bp, Artificial Sequence
  chemically synthesized
ataagcaagagttttttttt

SEQ ID NO: 62421 - DNA, 20 bp, Artificial Sequence
  chemically synthesized
aataagcaagagtttttttt

SEQ ID NO: 62422 - DNA, 20 bp, Artificial Sequence
  chemically synthesized
taataagcaagagttttttt

SEQ ID NO: 62423 - DNA, 20 bp, Artificial Sequence
  chemically synthesized
ctggtgcgttttaataagca

SEQ ID NO: 62424 - DNA, 20 bp, Artificial Sequence
  chemically synthesized
ttactggtgcgttttaataa

SEQ ID NO: 62425 - DNA, 20 bp, Artificial Sequence
  chemically synthesized
cttactggtgcgttttaata

SEQ ID NO: 62426 - DNA, 20 bp, Artificial Sequence
  chemically synthesized
tcttactggtgcgttttaat

SEQ ID NO: 62427 - DNA, 20 bp, Artificial Sequence
  chemically synthesized
ttttcttactggtgcgtttt

SEQ ID NO: 62428 - DNA, 20 bp, Artificial Sequence
  chemically synthesized
attttcttactggtgcgttt

SEQ ID NO: 62429 - DNA, 20 bp, Artificial Sequence
  chemically synthesized
tattttcttactggtgcgtt

SEQ ID NO: 62430 - DNA, 20 bp, Artificial Sequence
  chemically synthesized
ccattttattttcttactgg

SEQ ID NO: 62431 - DNA, 20 bp, Artificial Sequence
  chemically synthesized
gccattttattttcttactg

SEQ ID NO: 62432 - DNA, 20 bp, Artificial Sequence
  chemically synthesized
tgaagtttgccattttattt

SEQ ID NO: 62433 - DNA, 20 bp, Artificial Sequence
  chemically synthesized
tattctgaagtttgccattt

SEQ ID NO: 62434 - DNA, 20 bp, Artificial Sequence
  chemically synthesized
ctattctgaagtttgccatt

SEQ ID NO: 62435 - DNA, 20 bp, Artificial Sequence
  chemically synthesized
tctattctgaagtttgccat

SEQ ID NO: 62436 - DNA, 20 bp, Artificial Sequence
  chemically synthesized
catctattttctattctgaa

SEQ ID NO: 62437 - DNA, 20 bp, Artificial Sequence
  chemically synthesized
tcagatagatgtattgcatc

SEQ ID NO: 62438 - DNA, 20 bp, Artificial Sequence
  chemically synthesized
gtcagatagatgtattgcat

SEQ ID NO: 62439 - DNA, 20 bp, Artificial Sequence
  chemically synthesized
ctttgtcagatagatgtatt

SEQ ID NO: 62440 - DNA, 20 bp, Artificial Sequence
  chemically synthesized
cctttgtcagatagatgtat

SEQ ID NO: 62441 - DNA, 20 bp, Artificial Sequence
  chemically synthesized
tgtatacatttcctttgtca

SEQ ID NO: 62442 - DNA, 20 bp, Artificial Sequence
  chemically synthesized
tacattctgtatacatttcc

SEQ ID NO: 62443 - DNA, 20 bp, Artificial Sequence
  chemically synthesized
atacattctgtatacatttc

SEQ ID NO: 62444 - DNA, 20 bp, Artificial Sequence
  chemically synthesized
tttatacattctgtatacat

SEQ ID NO: 62445 - DNA, 20 bp, Artificial Sequence
  chemically synthesized
ctggatatgagttctttata

SEQ ID NO: 62446 - DNA, 20 bp, Artificial Sequence
  chemically synthesized
ttgctggatatgagttcttt

SEQ ID NO: 62447 - DNA, 20 bp, Artificial Sequence
  chemically synthesized
ttattgctggatatgagttc

SEQ ID NO: 62448 - DNA, 20 bp, Artificial Sequence
  chemically synthesized
gttattgctggatatgagtt

SEQ ID NO: 62449 - DNA, 20 bp, Artificial Sequence
  chemically synthesized
tgttattgctggatatgagt

SEQ ID NO: 62450 - DNA, 20 bp, Artificial Sequence
  chemically synthesized
tccttttgttattgctggat

SEQ ID NO: 62451 - DNA, 20 bp, Artificial Sequence
  chemically synthesized
gtccttttgttattgctgga

SEQ ID NO: 62452 - DNA, 20 bp, Artificial Sequence
  chemically synthesized
tttgtccttttgttattgct

SEQ ID NO: 62453 - DNA, 20 bp, Artificial Sequence
  chemically synthesized
aaagcactgagttatttgtc

SEQ ID NO: 62454 - DNA, 20 bp, Artificial Sequence
  chemically synthesized
ggctagtatctgttaaaagc

SEQ ID NO: 62455 - DNA, 20 bp, Artificial Sequence
  chemically synthesized
gggctagtatctgttaaaag

SEQ ID NO: 62456 - DNA, 20 bp, Artificial Sequence
  chemically synthesized
tttgggctagtatctgttaa

SEQ ID NO: 62457 - DNA, 20 bp, Artificial Sequence
  chemically synthesized
cctgtcttctttgggctagt

SEQ ID NO: 62458 - DNA, 20 bp, Artificial Sequence
  chemically synthesized
gcctgtcttctttgggctag

SEQ ID NO: 62459 - DNA, 20 bp, Artificial Sequence
  chemically synthesized
tgcctgtcttctttgggcta

SEQ ID NO: 62460 - DNA, 20 bp, Artificial Sequence
  chemically synthesized
gtcttttgcctgtcttcttt

SEQ ID NO: 62461 - DNA, 20 bp, Artificial Sequence
  chemically synthesized
atatacttggtcttttgcct

SEQ ID NO: 62462 - DNA, 20 bp, Artificial Sequence
  chemically synthesized
catatacttggtcttttgcc

SEQ ID NO: 62463 - DNA, 20 bp, Artificial Sequence
  chemically synthesized
tcatatacttggtcttttgc

SEQ ID NO: 62464 - DNA, 20 bp, Artificial Sequence
  chemically synthesized
agcagcttttcatatacttg

SEQ ID NO: 62465 - DNA, 20 bp, Artificial Sequence
  chemically synthesized
tcaaataacaaatgttgagc

SEQ ID NO: 62466 - DNA, 20 bp, Artificial Sequence
  chemically synthesized
gtcaaataacaaatgttgag

SEQ ID NO: 62467 - DNA, 20 bp, Artificial Sequence
  chemically synthesized
gcatttgtcaaataacaaat

SEQ ID NO: 62468 - DNA, 20 bp, Artificial Sequence
  chemically synthesized
attcgcatttgtcaaataac

SEQ ID NO: 62469 - DNA, 20 bp, Artificial Sequence
  chemically synthesized
aattcgcatttgtcaaataa

SEQ ID NO: 62470 - DNA, 20 bp, Artificial Sequence
  chemically synthesized
taattcgcatttgtcaaata

SEQ ID NO: 62471 - DNA, 20 bp, Artificial Sequence
  chemically synthesized
ttaattcgcatttgtcaaat

SEQ ID NO: 62472 - DNA, 20 bp, Artificial Sequence
  chemically synthesized
ggtttttaattcgcatttgt

SEQ ID NO: 62473 - DNA, 20 bp, Artificial Sequence
  chemically synthesized
ggatagtatctcgttaggtt

SEQ ID NO: 62474 - DNA, 20 bp, Artificial Sequence
  chemically synthesized
gggatagtatctcgttaggt

SEQ ID NO: 62475 - DNA, 20 bp, Artificial Sequence
  chemically synthesized
actttgggatagtatctcgt

SEQ ID NO: 62476 - DNA, 20 bp, Artificial Sequence
  chemically synthesized
gactttgggatagtatctcg

SEQ ID NO: 62477 - DNA, 20 bp, Artificial Sequence
  chemically synthesized
caacgtttgactttgggata

SEQ ID NO: 62478 - DNA, 20 bp, Artificial Sequence
  chemically synthesized
gcaacgtttgactttgggat

SEQ ID NO: 62479 - DNA, 20 bp, Artificial Sequence
  chemically synthesized
cagcgatgcatgagagatat

SEQ ID NO: 62480 - DNA, 20 bp, Artificial Sequence
  chemically synthesized
tactctccttccagcgatgc

SEQ ID NO: 62481 - DNA, 20 bp, Artificial Sequence
  chemically synthesized
taccattctactctccttcc

SEQ ID NO: 62482 - DNA, 20 bp, Artificial Sequence
  chemically synthesized
aaagtggttataccattcta

SEQ ID NO: 62483 - DNA, 20 bp, Artificial Sequence
  chemically synthesized
caaagtggttataccattct

SEQ ID NO: 62484 - DNA, 20 bp, Artificial Sequence
  chemically synthesized
tcaaagtggttataccattc

SEQ ID NO: 62485 - DNA, 20 bp, Artificial Sequence
  chemically synthesized
ttcaaagtggttataccatt

SEQ ID NO: 62486 - DNA, 20 bp, Artificial Sequence
  chemically synthesized
taagaaaccgcccaacagtt

SEQ ID NO: 62487 - DNA, 20 bp, Artificial Sequence
  chemically synthesized
ataagaaaccgcccaacagt

SEQ ID NO: 62488 - DNA, 20 bp, Artificial Sequence
  chemically synthesized
ctgtgtcataaggtaagcat

SEQ ID NO: 62489 - DNA, 20 bp, Artificial Sequence
  chemically synthesized
tggggtataaaacctcagaa

SEQ ID NO: 62490 - DNA, 20 bp, Artificial Sequence
  chemically synthesized
ctggggtataaaacctcaga

SEQ ID NO: 62491 - DNA, 20 bp, Artificial Sequence
  chemically synthesized
tctggggtataaaacctcag

SEQ ID NO: 62492 - DNA, 20 bp, Artificial Sequence
  chemically synthesized
ttctggggtataaaacctca

SEQ ID NO: 62493 - DNA, 20 bp, Artificial Sequence
  chemically synthesized
atttttctggggtataaaac

SEQ ID NO: 62494 - DNA, 20 bp, Artificial Sequence
  chemically synthesized
catttttctggggtataaaa

SEQ ID NO: 62495 - DNA, 20 bp, Artificial Sequence
  chemically synthesized
tcatttttctggggtataaa

SEQ ID NO: 62496 - DNA, 20 bp, Artificial Sequence
  chemically synthesized
tgtatatatattttcatttt

SEQ ID NO: 62497 - DNA, 20 bp, Artificial Sequence
  chemically synthesized
gtgtatatatattttcattt

SEQ ID NO: 62498 - DNA, 20 bp, Artificial Sequence
  chemically synthesized
gacaaatcagtttgtgtata

SEQ ID NO: 62499 - DNA, 20 bp, Artificial Sequence
  chemically synthesized
ttggacaaatcagtttgtgt

SEQ ID NO: 62500 - DNA, 20 bp, Artificial Sequence
  chemically synthesized
acattcttggacaaatcagt

SEQ ID NO: 62501 - DNA, 20 bp, Artificial Sequence
  chemically synthesized
ctgttcacattcttggacaa

SEQ ID NO: 62502 - DNA, 20 bp, Artificial Sequence
  chemically synthesized
ggttgctgttcacattcttg

SEQ ID NO: 62503 - DNA, 20 bp, Artificial Sequence
  chemically synthesized
aggttgctgttcacattctt

SEQ ID NO: 62504 - DNA, 20 bp, Artificial Sequence
  chemically synthesized
taggttgctgttcacattct

SEQ ID NO: 62505 - DNA, 20 bp, Artificial Sequence
  chemically synthesized
ttaggttgctgttcacattc

SEQ ID NO: 62506 - DNA, 20 bp, Artificial Sequence
  chemically synthesized
tttaggttgctgttcacatt

SEQ ID NO: 62507 - DNA, 20 bp, Artificial Sequence
  chemically synthesized
ttttttaggttgctgttcac

SEQ ID NO: 62508 - DNA, 20 bp, Artificial Sequence
  chemically synthesized
agactattattttttaggtt

SEQ ID NO: 62509 - DNA, 20 bp, Artificial Sequence
  chemically synthesized
gagactattattttttaggt

SEQ ID NO: 62510 - DNA, 20 bp, Artificial Sequence
  chemically synthesized
aagtttgagactattatttt

SEQ ID NO: 62511 - DNA, 20 bp, Artificial Sequence
  chemically synthesized
caagtttgagactattattt

SEQ ID NO: 62512 - DNA, 20 bp, Artificial Sequence
  chemically synthesized
tcaagtttgagactattatt

SEQ ID NO: 62513 - DNA, 20 bp, Artificial Sequence
  chemically synthesized
ttcaagtttgagactattat

SEQ ID NO: 62514 - DNA, 20 bp, Artificial Sequence
  chemically synthesized
tttcaagtttgagactatta

SEQ ID NO: 62515 - DNA, 20 bp, Artificial Sequence
  chemically synthesized
tgttttttcaagtttgagac

SEQ ID NO: 62516 - DNA, 20 bp, Artificial Sequence
  chemically synthesized
gtgttttttcaagtttgaga

SEQ ID NO: 62517 - DNA, 20 bp, Artificial Sequence
  chemically synthesized
atgaacatttgtgttttttc

SEQ ID NO: 62518 - DNA, 20 bp, Artificial Sequence
  chemically synthesized
ttgatgaacatttgtgtttt

SEQ ID NO: 62519 - DNA, 20 bp, Artificial Sequence
  chemically synthesized
tcttcttgatgaacatttgt

SEQ ID NO: 62520 - DNA, 20 bp, Artificial Sequence
  chemically synthesized
ctcttcttgatgaacatttg

SEQ ID NO: 62521 - DNA, 20 bp, Artificial Sequence
  chemically synthesized
tttctcttcttgatgaacat

SEQ ID NO: 62522 - DNA, 20 bp, Artificial Sequence
  chemically synthesized
attctttctcttcttgatga

SEQ ID NO: 62523 - DNA, 20 bp, Artificial Sequence
  chemically synthesized
aattctttctcttcttgatg

SEQ ID NO: 62524 - DNA, 20 bp, Artificial Sequence
  chemically synthesized
taattctttctcttcttgat

SEQ ID NO: 62525 - DNA, 20 bp, Artificial Sequence
  chemically synthesized
ttaattctttctcttcttga

SEQ ID NO: 62526 - DNA, 20 bp, Artificial Sequence
  chemically synthesized
cactgtatgaatataccaca

SEQ ID NO: 62527 - DNA, 20 bp, Artificial Sequence
  chemically synthesized
ctaagtagtaattccactgt

SEQ ID NO: 62528 - DNA, 20 bp, Artificial Sequence
  chemically synthesized
aattgctaagtagtaattcc

SEQ ID NO: 62529 - DNA, 20 bp, Artificial Sequence
  chemically synthesized
caattgctaagtagtaattc

SEQ ID NO: 62530 - DNA, 20 bp, Artificial Sequence
  chemically synthesized
tcaattgctaagtagtaatt

SEQ ID NO: 62531 - DNA, 20 bp, Artificial Sequence
  chemically synthesized
atgtccatctcatagctcat

SEQ ID NO: 62532 - DNA, 20 bp, Artificial Sequence
  chemically synthesized
gccatgttgatgtccatctc

SEQ ID NO: 62533 - DNA, 20 bp, Artificial Sequence
  chemically synthesized
tgagagttagccatgttgat

SEQ ID NO: 62534 - DNA, 20 bp, Artificial Sequence
  chemically synthesized
gtgagagttagccatgttga

SEQ ID NO: 62535 - DNA, 20 bp, Artificial Sequence
  chemically synthesized
accagtgtttgtgagagtta

SEQ ID NO: 62536 - DNA, 20 bp, Artificial Sequence
  chemically synthesized
aaccagtgtttgtgagagtt

SEQ ID NO: 62537 - DNA, 20 bp, Artificial Sequence
  chemically synthesized
atttaaccagtgtttgtgag

SEQ ID NO: 62538 - DNA, 20 bp, Artificial Sequence
  chemically synthesized
catttaaccagtgtttgtga

SEQ ID NO: 62539 - DNA, 20 bp, Artificial Sequence
  chemically synthesized
tttcatttaaccagtgtttg

SEQ ID NO: 62540 - DNA, 20 bp, Artificial Sequence
  chemically synthesized
tgtcttctttcatttaacca

SEQ ID NO: 62541 - DNA, 20 bp, Artificial Sequence
  chemically synthesized
ctgtcttctttcatttaacc

SEQ ID NO: 62542 - DNA, 20 bp, Artificial Sequence
  chemically synthesized
tctgtcttctttcatttaac

SEQ ID NO: 62543 - DNA, 20 bp, Artificial Sequence
  chemically synthesized
ttttctgtcttctttcattt

SEQ ID NO: 62544 - DNA, 20 bp, Artificial Sequence
  chemically synthesized
ttcttttctgtcttctttca

SEQ ID NO: 62545 - DNA, 20 bp, Artificial Sequence
  chemically synthesized
attcttttctgtcttctttc

SEQ ID NO: 62546 - DNA, 20 bp, Artificial Sequence
  chemically synthesized
atagaatactctttattctt

SEQ ID NO: 62547 - DNA, 20 bp, Artificial Sequence
  chemically synthesized
ttaatagaatactctttatt

SEQ ID NO: 62548 - DNA, 20 bp, Artificial Sequence
  chemically synthesized
ttattaatagaatactcttt

SEQ ID NO: 62549 - DNA, 20 bp, Artificial Sequence
  chemically synthesized
tgatagttcttattaataga

SEQ ID NO: 62550 - DNA, 20 bp, Artificial Sequence
  chemically synthesized
ctgatagttcttattaatag

SEQ ID NO: 62551 - DNA, 20 bp, Artificial Sequence
  chemically synthesized
ccagtttctgatagttctta

SEQ ID NO: 62552 - DNA, 20 bp, Artificial Sequence
  chemically synthesized
gccagtttctgatagttctt

SEQ ID NO: 62553 - DNA, 20 bp, Artificial Sequence
  chemically synthesized
tgccagtttctgatagttct

SEQ ID NO: 62554 - DNA, 20 bp, Artificial Sequence
  chemically synthesized
ttgccagtttctgatagttc

SEQ ID NO: 62555 - DNA, 20 bp, Artificial Sequence
  chemically synthesized
gtttttgccagtttctgata

SEQ ID NO: 62556 - DNA, 20 bp, Artificial Sequence
  chemically synthesized
ggtttttgccagtttctgat

SEQ ID NO: 62557 - DNA, 20 bp, Artificial Sequence
  chemically synthesized
ccctttggtttttgccagtt

SEQ ID NO: 62558 - DNA, 20 bp, Artificial Sequence
  chemically synthesized
tattaccctttggtttttgc

SEQ ID NO: 62559 - DNA, 20 bp, Artificial Sequence
  chemically synthesized
tcaattctattaccctttgg

SEQ ID NO: 62560 - DNA, 20 bp, Artificial Sequence
  chemically synthesized
ataccccaggagcaatcata

SEQ ID NO: 62561 - DNA, 20 bp, Artificial Sequence
  chemically synthesized
cagtcaatcttcatacccca

SEQ ID NO: 62562 - DNA, 20 bp, Artificial Sequence
  chemically synthesized
ccagtcaatcttcatacccc

SEQ ID NO: 62563 - DNA, 20 bp, Artificial Sequence
  chemically synthesized
ctttccagtcaatcttcata

SEQ ID NO: 62564 - DNA, 20 bp, Artificial Sequence
  chemically synthesized
atgttcctttccagtcaatc

SEQ ID NO: 62565 - DNA, 20 bp, Artificial Sequence
  chemically synthesized
ccctagaaggatgcttcatg

SEQ ID NO: 62566 - DNA, 20 bp, Artificial Sequence
  chemically synthesized
cccctagaaggatgcttcat

SEQ ID NO: 62567 - DNA, 20 bp, Artificial Sequence
  chemically synthesized
tcccctagaaggatgcttca

SEQ ID NO: 62568 - DNA, 20 bp, Artificial Sequence
  chemically synthesized
ttcccctagaaggatgcttc

SEQ ID NO: 62569 - DNA, 20 bp, Artificial Sequence
  chemically synthesized
tttttcccctagaaggatgc

SEQ ID NO: 62570 - DNA, 20 bp, Artificial Sequence
  chemically synthesized
caatggtaaagatatagaac

SEQ ID NO: 62571 - DNA, 20 bp, Artificial Sequence
  chemically synthesized
gagaaatgtctatgacctgt

SEQ ID NO: 62572 - DNA, 20 bp, Artificial Sequence
  chemically synthesized
ggagaaatgtctatgacctg

SEQ ID NO: 62573 - DNA, 20 bp, Artificial Sequence
  chemically synthesized
agtgaatttggagaaatgtc

SEQ ID NO: 62574 - DNA, 20 bp, Artificial Sequence
  chemically synthesized
tgtgtggtaaaatgcacaaa

SEQ ID NO: 62575 - DNA, 20 bp, Artificial Sequence
  chemically synthesized
atgtgtggtaaaatgcacaa

SEQ ID NO: 62576 - DNA, 20 bp, Artificial Sequence
  chemically synthesized
ggggtaaaatttatgtgtgg

SEQ ID NO: 62577 - DNA, 20 bp, Artificial Sequence
  chemically synthesized
aggggtaaaatttatgtgtg

SEQ ID NO: 62578 - DNA, 20 bp, Artificial Sequence
  chemically synthesized
taggggtaaaatttatgtgt

SEQ ID NO: 62579 - DNA, 20 bp, Artificial Sequence
  chemically synthesized
caatgcattttaggggtaaa

SEQ ID NO: 62580 - DNA, 20 bp, Artificial Sequence
  chemically synthesized
attacaatgcattttagggg

SEQ ID NO: 62581 - DNA, 20 bp, Artificial Sequence
  chemically synthesized
gattacaatgcattttaggg

SEQ ID NO: 62582 - DNA, 20 bp, Artificial Sequence
  chemically synthesized
tttgattacaatgcatttta

SEQ ID NO: 62583 - DNA, 20 bp, Artificial Sequence
  chemically synthesized
ttgtttgattacaatgcatt

SEQ ID NO: 62584 - DNA, 20 bp, Artificial Sequence
  chemically synthesized
cttgtttgattacaatgcat

SEQ ID NO: 62585 - DNA, 20 bp, Artificial Sequence
  chemically synthesized
ctttcttgtttgattacaat

SEQ ID NO: 62586 - DNA, 20 bp, Artificial Sequence
  chemically synthesized
gctttcttgtttgattacaa

SEQ ID NO: 62587 - DNA, 20 bp, Artificial Sequence
  chemically synthesized
tttgctttcttgtttgatta

SEQ ID NO: 62588 - DNA, 20 bp, Artificial Sequence
  chemically synthesized
ctttgctttcttgtttgatt

SEQ ID NO: 62589 - DNA, 20 bp, Artificial Sequence
  chemically synthesized
tctttgctttcttgtttgat

SEQ ID NO: 62590 - DNA, 20 bp, Artificial Sequence
  chemically synthesized
ttctttgctttcttgtttga

SEQ ID NO: 62591 - DNA, 20 bp, Artificial Sequence
  chemically synthesized
tttttctttgctttcttgtt

SEQ ID NO: 62592 - DNA, 20 bp, Artificial Sequence
  chemically synthesized
cttatttttctttgctttct

SEQ ID NO: 62593 - DNA, 20 bp, Artificial Sequence
  chemically synthesized
acttatttttctttgctttc

SEQ ID NO: 62594 - DNA, 20 bp, Artificial Sequence
  chemically synthesized
tttacttatttttctttgct

SEQ ID NO: 62595 - DNA, 20 bp, Artificial Sequence
  chemically synthesized
cattatttacttatttttct

SEQ ID NO: 62596 - DNA, 20 bp, Artificial Sequence
  chemically synthesized
acattatttacttatttttc

SEQ ID NO: 62597 - DNA, 20 bp, Artificial Sequence
  chemically synthesized
tacattatttacttattttt

SEQ ID NO: 62598 - DNA, 20 bp, Artificial Sequence
  chemically synthesized
ttacattatttacttatttt

SEQ ID NO: 62599 - DNA, 20 bp, Artificial Sequence
  chemically synthesized
atttttacattatttactta

SEQ ID NO: 62600 - DNA, 20 bp, Artificial Sequence
  chemically synthesized
aatttttacattatttactt

SEQ ID NO: 62601 - DNA, 20 bp, Artificial Sequence
  chemically synthesized
tttaatttttacattattta

SEQ ID NO: 62602 - DNA, 20 bp, Artificial Sequence
  chemically synthesized
cttctttaatttttacatta

SEQ ID NO: 62603 - DNA, 20 bp, Artificial Sequence
  chemically synthesized
ttacttctttaatttttaca

SEQ ID NO: 62604 - DNA, 20 bp, Artificial Sequence
  chemically synthesized
gttacttctttaatttttac

SEQ ID NO: 62605 - DNA, 20 bp, Artificial Sequence
  chemically synthesized
caatgagaatatataccttt

SEQ ID NO: 62606 - DNA, 20 bp, Artificial Sequence
  chemically synthesized
acaatgagaatatatacctt

SEQ ID NO: 62607 - DNA, 20 bp, Artificial Sequence
  chemically synthesized
tacctttacaatgagaatat

SEQ ID NO: 62608 - DNA, 20 bp, Artificial Sequence
  chemically synthesized
ttctacctttacaatgagaa

SEQ ID NO: 62609 - DNA, 20 bp, Artificial Sequence
  chemically synthesized
attctacctttacaatgaga

SEQ ID NO: 62610 - DNA, 20 bp, Artificial Sequence
  chemically synthesized
tattctacctttacaatgag

SEQ ID NO: 62611 - DNA, 20 bp, Artificial Sequence
  chemically synthesized
cttttattctacctttacaa

SEQ ID NO: 62612 - DNA, 20 bp, Artificial Sequence
  chemically synthesized
ggaaaggaaaataaccctat

SEQ ID NO: 62613 - DNA, 20 bp, Artificial Sequence
  chemically synthesized
gggttgggaaaggaaaataa

SEQ ID NO: 62614 - DNA, 20 bp, Artificial Sequence
  chemically synthesized
agggttgggaaaggaaaata

SEQ ID NO: 62615 - DNA, 20 bp, Artificial Sequence
  chemically synthesized
aatttagggttgggaaagga

SEQ ID NO: 62616 - DNA, 20 bp, Artificial Sequence
  chemically synthesized
tcacagaagaggaaaattaa

SEQ ID NO: 62617 - DNA, 20 bp, Artificial Sequence
  chemically synthesized
atcacagaagaggaaaatta

SEQ ID NO: 62618 - DNA, 20 bp, Artificial Sequence
  chemically synthesized
gtaactgtgtttatcacaga

SEQ ID NO: 62619 - DNA, 20 bp, Artificial Sequence
  chemically synthesized
aacagcacataggaaaaaca

SEQ ID NO: 62620 - DNA, 20 bp, Artificial Sequence
  chemically synthesized
gctgagcttaaacagcacat

SEQ ID NO: 62621 - DNA, 20 bp, Artificial Sequence
  chemically synthesized
ggctgagcttaaacagcaca

SEQ ID NO: 62622 - DNA, 20 bp, Artificial Sequence
  chemically synthesized
gagctatttggctgagctta

SEQ ID NO: 62623 - DNA, 20 bp, Artificial Sequence
  chemically synthesized
agagctatttggctgagctt

SEQ ID NO: 62624 - DNA, 20 bp, Artificial Sequence
  chemically synthesized
tacctctttagagctatttg

SEQ ID NO: 62625 - DNA, 20 bp, Artificial Sequence
  chemically synthesized
acccagttatacctctttag

SEQ ID NO: 62626 - DNA, 20 bp, Artificial Sequence
  chemically synthesized
gacccagttatacctcttta

SEQ ID NO: 62627 - DNA, 20 bp, Artificial Sequence
  chemically synthesized
caatttgacccagttatacc

SEQ ID NO: 62628 - DNA, 20 bp, Artificial Sequence
  chemically synthesized
acttccaatttgacccagtt

SEQ ID NO: 62629 - DNA, 20 bp, Artificial Sequence
  chemically synthesized
tgcccagatcttcacttcca

SEQ ID NO: 62630 - DNA, 20 bp, Artificial Sequence
  chemically synthesized
ttctgcccagatcttcactt

SEQ ID NO: 62631 - DNA, 20 bp, Artificial Sequence
  chemically synthesized
cttctgcccagatcttcact

SEQ ID NO: 62632 - DNA, 20 bp, Artificial Sequence
  chemically synthesized
tcttctgcccagatcttcac

SEQ ID NO: 62633 - DNA, 20 bp, Artificial Sequence
  chemically synthesized
cccagaggaacttttcttct

SEQ ID NO: 62634 - DNA, 20 bp, Artificial Sequence
  chemically synthesized
atatacgcaaacttacccag

SEQ ID NO: 62635 - DNA, 20 bp, Artificial Sequence
  chemically synthesized
catatacgcaaacttaccca

SEQ ID NO: 62636 - DNA, 20 bp, Artificial Sequence
  chemically synthesized
tttcatatacgcaaacttac

SEQ ID NO: 62637 - DNA, 20 bp, Artificial Sequence
  chemically synthesized
atggaaagaattctttcata

SEQ ID NO: 62638 - DNA, 20 bp, Artificial Sequence
  chemically synthesized
catcggttaatggaaagaat

SEQ ID NO: 62639 - DNA, 20 bp, Artificial Sequence
  chemically synthesized
aacaaaattacatcggttaa

SEQ ID NO: 62640 - DNA, 20 bp, Artificial Sequence
  chemically synthesized
aaacaaaattacatcggtta

SEQ ID NO: 62641 - DNA, 20 bp, Artificial Sequence
  chemically synthesized
ggatttaaacaaaattacat

SEQ ID NO: 62642 - DNA, 20 bp, Artificial Sequence
  chemically synthesized
ctagaacacactccttagga

SEQ ID NO: 62643 - DNA, 20 bp, Artificial Sequence
  chemically synthesized
taggtagtaaaaggccttcc

SEQ ID NO: 62644 - DNA, 20 bp, Artificial Sequence
  chemically synthesized
tgggttgtaggtagtaaaag

SEQ ID NO: 62645 - DNA, 20 bp, Artificial Sequence
  chemically synthesized
accaagggaagccaacacac

SEQ ID NO: 62646 - DNA, 20 bp, Artificial Sequence
  chemically synthesized
agcacatgcagagaagagtg

SEQ ID NO: 62647 - DNA, 20 bp, Artificial Sequence
  chemically synthesized
gagcacatgcagagaagagt

SEQ ID NO: 62648 - DNA, 20 bp, Artificial Sequence
  chemically synthesized
tcgaaaggactcatttgagc

SEQ ID NO: 62649 - DNA, 20 bp, Artificial Sequence
  chemically synthesized
tgcagagtccaggaaccatt

SEQ ID NO: 62650 - DNA, 20 bp, Artificial Sequence
  chemically synthesized
gtgcagagtccaggaaccat

SEQ ID NO: 62651 - DNA, 20 bp, Artificial Sequence
  chemically synthesized
tgtgcagagtccaggaacca

SEQ ID NO: 62652 - DNA, 20 bp, Artificial Sequence
  chemically synthesized
ttgtgcagagtccaggaacc

SEQ ID NO: 62653 - DNA, 20 bp, Artificial Sequence
  chemically synthesized
ctctttttgtgcagagtcca

SEQ ID NO: 62654 - DNA, 20 bp, Artificial Sequence
  chemically synthesized
acctcctggccagctcactc

SEQ ID NO: 62655 - DNA, 20 bp, Artificial Sequence
  chemically synthesized
aacctcctggccagctcact

SEQ ID NO: 62656 - DNA, 20 bp, Artificial Sequence
  chemically synthesized
tgtaacaaaagctagggcac

SEQ ID NO: 62657 - DNA, 20 bp, Artificial Sequence
  chemically synthesized
accagtcactctcagaccac

SEQ ID NO: 62658 - DNA, 20 bp, Artificial Sequence
  chemically synthesized
atgactgtaggagcttaacc

SEQ ID NO: 62659 - DNA, 20 bp, Artificial Sequence
  chemically synthesized
catgactgtaggagcttaac

SEQ ID NO: 62660 - DNA, 20 bp, Artificial Sequence
  chemically synthesized
tcatgactgtaggagcttaa

SEQ ID NO: 62661 - DNA, 20 bp, Artificial Sequence
  chemically synthesized
accaatctctagttttcatg

SEQ ID NO: 62662 - DNA, 20 bp, Artificial Sequence
  chemically synthesized
ttcaccaatctctagttttc

SEQ ID NO: 62663 - DNA, 20 bp, Artificial Sequence
  chemically synthesized
cttcaccaatctctagtttt

SEQ ID NO: 62664 - DNA, 20 bp, Artificial Sequence
  chemically synthesized
acatttcttcaccaatctct

SEQ ID NO: 62665 - DNA, 20 bp, Artificial Sequence
  chemically synthesized
acttaacatttcttcaccaa

SEQ ID NO: 62666 - DNA, 20 bp, Artificial Sequence
  chemically synthesized
attaacttaacatttcttca

SEQ ID NO: 62667 - DNA, 20 bp, Artificial Sequence
  chemically synthesized
gccagttaattaacttaaca

SEQ ID NO: 62668 - DNA, 20 bp, Artificial Sequence
  chemically synthesized
agccagttaattaacttaac

SEQ ID NO: 62669 - DNA, 20 bp, Artificial Sequence
  chemically synthesized
aggaatgtccccaaaataat

SEQ ID NO: 62670 - DNA, 20 bp, Artificial Sequence
  chemically synthesized
aaggaatgtccccaaaataa

SEQ ID NO: 62671 - DNA, 20 bp, Artificial Sequence
  chemically synthesized
taaggaatgtccccaaaata

SEQ ID NO: 62672 - DNA, 20 bp, Artificial Sequence
  chemically synthesized
ggagaacagttttaaggaat

SEQ ID NO: 62673 - DNA, 20 bp, Artificial Sequence
  chemically synthesized
gggagaacagttttaaggaa

SEQ ID NO: 62674 - DNA, 20 bp, Artificial Sequence
  chemically synthesized
acaaaagtaacgatttggga

SEQ ID NO: 62675 - DNA, 20 bp, Artificial Sequence
  chemically synthesized
aagcctaaacaatcgcacac

SEQ ID NO: 62676 - DNA, 20 bp, Artificial Sequence
  chemically synthesized
aaagcctaaacaatcgcaca

SEQ ID NO: 62677 - DNA, 20 bp, Artificial Sequence
  chemically synthesized
agacacacacacacatacac

SEQ ID NO: 62678 - DNA, 20 bp, Artificial Sequence
  chemically synthesized
gagacacacacacacataca

SEQ ID NO: 62679 - DNA, 20 bp, Artificial Sequence
  chemically synthesized
ggaaagcctatctaccccaa

SEQ ID NO: 62680 - DNA, 20 bp, Artificial Sequence
  chemically synthesized
caagttgggaaagcctatct

SEQ ID NO: 62681 - DNA, 20 bp, Artificial Sequence
  chemically synthesized
tcctgttccaagttgggaaa

SEQ ID NO: 62682 - DNA, 20 bp, Artificial Sequence
  chemically synthesized
atcctgttccaagttgggaa

SEQ ID NO: 62683 - DNA, 20 bp, Artificial Sequence
  chemically synthesized
tatcctgttccaagttggga

SEQ ID NO: 62684 - DNA, 20 bp, Artificial Sequence
  chemically synthesized
ttatcctgttccaagttggg

SEQ ID NO: 62685 - DNA, 20 bp, Artificial Sequence
  chemically synthesized
tttttatcctgttccaagtt

SEQ ID NO: 62686 - DNA, 20 bp, Artificial Sequence
  chemically synthesized
atttttatcctgttccaagt

SEQ ID NO: 62687 - DNA, 20 bp, Artificial Sequence
  chemically synthesized
tatttttatcctgttccaag

SEQ ID NO: 62688 - DNA, 20 bp, Artificial Sequence
  chemically synthesized
ttatttttatcctgttccaa

SEQ ID NO: 62689 - DNA, 20 bp, Artificial Sequence
  chemically synthesized
ggtttttatttttatcctgt

SEQ ID NO: 62690 - DNA, 20 bp, Artificial Sequence
  chemically synthesized
cccaaaaattcggtttttat

SEQ ID NO: 62691 - DNA, 20 bp, Artificial Sequence
  chemically synthesized
cctggtatctgtctagctta

SEQ ID NO: 62692 - DNA, 20 bp, Artificial Sequence
  chemically synthesized
ttccctggtatctgtctagc

SEQ ID NO: 62693 - DNA, 20 bp, Artificial Sequence
  chemically synthesized
tcctaagcttattccctggt

SEQ ID NO: 62694 - DNA, 20 bp, Artificial Sequence
  chemically synthesized
gtcctaagcttattccctgg

SEQ ID NO: 62695 - DNA, 20 bp, Artificial Sequence
  chemically synthesized
cacctgatgtttgtcctaag

SEQ ID NO: 62696 - DNA, 20 bp, Artificial Sequence
  chemically synthesized
ccacctgatgtttgtcctaa

SEQ ID NO: 62697 - DNA, 20 bp, Artificial Sequence
  chemically synthesized
agatctttccacctgatgtt

SEQ ID NO: 62698 - DNA, 20 bp, Artificial Sequence
  chemically synthesized
ccatcttcagatctttccac

SEQ ID NO: 62699 - DNA, 20 bp, Artificial Sequence
  chemically synthesized
tcaaatcgtgacaacattac

SEQ ID NO: 62700 - DNA, 20 bp, Artificial Sequence
  chemically synthesized
atcaaatcgtgacaacatta

SEQ ID NO: 62701 - DNA, 20 bp, Artificial Sequence
  chemically synthesized
tttatcaaatcgtgacaaca

SEQ ID NO: 62702 - DNA, 20 bp, Artificial Sequence
  chemically synthesized
atttatcaaatcgtgacaac

SEQ ID NO: 62703 - DNA, 20 bp, Artificial Sequence
  chemically synthesized
tatatttatttatcaaatcg

SEQ ID NO: 62704 - DNA, 20 bp, Artificial Sequence
  chemically synthesized
agaaatgggaccccgctccc

SEQ ID NO: 62705 - DNA, 20 bp, Artificial Sequence
  chemically synthesized
cctaaaattcagaaatggga

SEQ ID NO: 62706 - DNA, 20 bp, Artificial Sequence
  chemically synthesized
acctaaaattcagaaatggg

SEQ ID NO: 62707 - DNA, 20 bp, Artificial Sequence
  chemically synthesized
tccacatcccatgtttacct

SEQ ID NO: 62708 - DNA, 20 bp, Artificial Sequence
  chemically synthesized
ctccacatcccatgtttacc

SEQ ID NO: 62709 - DNA, 20 bp, Artificial Sequence
  chemically synthesized
tcctagtttctccacatccc

SEQ ID NO: 62710 - DNA, 20 bp, Artificial Sequence
  chemically synthesized
ttgtcctagtttctccacat

SEQ ID NO: 62711 - DNA, 20 bp, Artificial Sequence
  chemically synthesized
aactaaaagttattgtccta

SEQ ID NO: 62712 - DNA, 20 bp, Artificial Sequence
  chemically synthesized
tatactcaagaattgaacta

SEQ ID NO: 62713 - DNA, 20 bp, Artificial Sequence
  chemically synthesized
caaatatattctatactcaa

SEQ ID NO: 62714 - DNA, 20 bp, Artificial Sequence
  chemically synthesized
cttacaaatatattctatac

SEQ ID NO: 62715 - DNA, 20 bp, Artificial Sequence
  chemically synthesized
ccttacaaatatattctata

SEQ ID NO: 62716 - DNA, 20 bp, Artificial Sequence
  chemically synthesized
acacatactttccttacaaa

SEQ ID NO: 62717 - DNA, 20 bp, Artificial Sequence
  chemically synthesized
cacacatactttccttacaa

SEQ ID NO: 62718 - DNA, 20 bp, Artificial Sequence
  chemically synthesized
gatatttcacacatactttc

SEQ ID NO: 62719 - DNA, 20 bp, Artificial Sequence
  chemically synthesized
gggcctgtaattggatattt

SEQ ID NO: 62720 - DNA, 20 bp, Artificial Sequence
  chemically synthesized
ctacaggttggggcctgtaa

SEQ ID NO: 62721 - DNA, 20 bp, Artificial Sequence
  chemically synthesized
ccaacagtaccagaaacttg

SEQ ID NO: 62722 - DNA, 20 bp, Artificial Sequence
  chemically synthesized
aattcccaacagtaccagaa

SEQ ID NO: 62723 - DNA, 20 bp, Artificial Sequence
  chemically synthesized
gatcctccttaaattcccaa

SEQ ID NO: 62724 - DNA, 20 bp, Artificial Sequence
  chemically synthesized
agatcctccttaaattccca

SEQ ID NO: 62725 - DNA, 20 bp, Artificial Sequence
  chemically synthesized
tagatcctccttaaattccc

SEQ ID NO: 62726 - DNA, 20 bp, Artificial Sequence
  chemically synthesized
tcaaaatcatgggaatgagc

SEQ ID NO: 62727 - DNA, 20 bp, Artificial Sequence
  chemically synthesized
attctcaaaatcatgggaat

SEQ ID NO: 62728 - DNA, 20 bp, Artificial Sequence
  chemically synthesized
cattctcaaaatcatgggaa

SEQ ID NO: 62729 - DNA, 20 bp, Artificial Sequence
  chemically synthesized
atttcattctcaaaatcatg

SEQ ID NO: 62730 - DNA, 20 bp, Artificial Sequence
  chemically synthesized
ctcattaatttcattctcaa

SEQ ID NO: 62731 - DNA, 20 bp, Artificial Sequence
  chemically synthesized
tccattgctcattaatttca

SEQ ID NO: 62732 - DNA, 20 bp, Artificial Sequence
  chemically synthesized
attgtccattgctcattaat

SEQ ID NO: 62733 - DNA, 20 bp, Artificial Sequence
  chemically synthesized
acaagacagccatacggtca

SEQ ID NO: 62734 - DNA, 20 bp, Artificial Sequence
  chemically synthesized
cacaagacagccatacggtc

SEQ ID NO: 62735 - DNA, 20 bp, Artificial Sequence
  chemically synthesized
aaaggatgcccagtttcaca

SEQ ID NO: 62736 - DNA, 20 bp, Artificial Sequence
  chemically synthesized
agagcccttaaaaggatgcc

SEQ ID NO: 62737 - DNA, 20 bp, Artificial Sequence
  chemically synthesized
atagatgaactcctggagtt

SEQ ID NO: 62738 - DNA, 20 bp, Artificial Sequence
  chemically synthesized
aatagatgaactcctggagt

SEQ ID NO: 62739 - DNA, 20 bp, Artificial Sequence
  chemically synthesized
agtggaaaatatatgtatga

SEQ ID NO: 62740 - DNA, 20 bp, Artificial Sequence
  chemically synthesized
cagtggaaaatatatgtatg

SEQ ID NO: 62741 - DNA, 20 bp, Artificial Sequence
  chemically synthesized
tcagtggaaaatatatgtat

SEQ ID NO: 62742 - DNA, 20 bp, Artificial Sequence
  chemically synthesized
agaaagaaacgttttcagtg

SEQ ID NO: 62743 - DNA, 20 bp, Artificial Sequence
  chemically synthesized
gaaagggactgccttaagaa

SEQ ID NO: 62744 - DNA, 20 bp, Artificial Sequence
  chemically synthesized
agttggaaagggactgcctt

SEQ ID NO: 62745 - DNA, 20 bp, Artificial Sequence
  chemically synthesized
cagttggaaagggactgcct

SEQ ID NO: 62746 - DNA, 20 bp, Artificial Sequence
  chemically synthesized
agatatttcagttggaaagg

SEQ ID NO: 62747 - DNA, 20 bp, Artificial Sequence
  chemically synthesized
gattcagatatttcagttgg

SEQ ID NO: 62748 - DNA, 20 bp, Artificial Sequence
  chemically synthesized
caattggattcagatatttc

SEQ ID NO: 62749 - DNA, 20 bp, Artificial Sequence
  chemically synthesized
ccaattggattcagatattt

SEQ ID NO: 62750 - DNA, 20 bp, Artificial Sequence
  chemically synthesized
tccaattggattcagatatt

SEQ ID NO: 62751 - DNA, 20 bp, Artificial Sequence
  chemically synthesized
ggttttccaattggattcag

SEQ ID NO: 62752 - DNA, 20 bp, Artificial Sequence
  chemically synthesized
gggttttccaattggattca

SEQ ID NO: 62753 - DNA, 20 bp, Artificial Sequence
  chemically synthesized
taatctgtccagagcctcct

SEQ ID NO: 62754 - DNA, 20 bp, Artificial Sequence
  chemically synthesized
ctgtcatattgtaatctgtc

SEQ ID NO: 62755 - DNA, 20 bp, Artificial Sequence
  chemically synthesized
cctgtcatattgtaatctgt

SEQ ID NO: 62756 - DNA, 20 bp, Artificial Sequence
  chemically synthesized
tcctgtcatattgtaatctg

SEQ ID NO: 62757 - DNA, 20 bp, Artificial Sequence
  chemically synthesized
acttttcctgtcatattgta

SEQ ID NO: 62758 - DNA, 20 bp, Artificial Sequence
  chemically synthesized
acatatctcttgacttttcc

SEQ ID NO: 62759 - DNA, 20 bp, Artificial Sequence
  chemically synthesized
aacatatctcttgacttttc

SEQ ID NO: 62760 - DNA, 20 bp, Artificial Sequence
  chemically synthesized
ccctttaacatatctcttga

SEQ ID NO: 62761 - DNA, 20 bp, Artificial Sequence
  chemically synthesized
cccactcaaacatacttacc

SEQ ID NO: 62762 - DNA, 20 bp, Artificial Sequence
  chemically synthesized
cttgcccactcaaacatact

SEQ ID NO: 62763 - DNA, 20 bp, Artificial Sequence
  chemically synthesized
accacttccttgcccactca

SEQ ID NO: 62764 - DNA, 20 bp, Artificial Sequence
  chemically synthesized
gaccacttccttgcccactc

SEQ ID NO: 62765 - DNA, 20 bp, Artificial Sequence
  chemically synthesized
acaccatatttgaccacttc

SEQ ID NO: 62766 - DNA, 20 bp, Artificial Sequence
  chemically synthesized
attcacaccatatttgacca

SEQ ID NO: 62767 - DNA, 20 bp, Artificial Sequence
  chemically synthesized
cattcacaccatatttgacc

SEQ ID NO: 62768 - DNA, 20 bp, Artificial Sequence
  chemically synthesized
actttcattcacaccatatt

SEQ ID NO: 62769 - DNA, 20 bp, Artificial Sequence
  chemically synthesized
tgttcactttcattcacacc

SEQ ID NO: 62770 - DNA, 20 bp, Artificial Sequence
  chemically synthesized
ctgttcactttcattcacac

SEQ ID NO: 62771 - DNA, 20 bp, Artificial Sequence
  chemically synthesized
acctttctgttcactttcat

SEQ ID NO: 62772 - DNA, 20 bp, Artificial Sequence
  chemically synthesized
gccaagctgaggttgacctt

SEQ ID NO: 62773 - DNA, 20 bp, Artificial Sequence
  chemically synthesized
tcttggccaagctgaggttg

SEQ ID NO: 62774 - DNA, 20 bp, Artificial Sequence
  chemically synthesized
ctcttggccaagctgaggtt

SEQ ID NO: 62775 - DNA, 20 bp, Artificial Sequence
  chemically synthesized
atcctggtttctcttggcca

SEQ ID NO: 62776 - DNA, 20 bp, Artificial Sequence
  chemically synthesized
accagctggctggtgggctg

SEQ ID NO: 62777 - DNA, 20 bp, Artificial Sequence
  chemically synthesized
aaccagctggctggtgggct

SEQ ID NO: 62778 - DNA, 20 bp, Artificial Sequence
  chemically synthesized
tttaaccagctggctggtgg

SEQ ID NO: 62779 - DNA, 20 bp, Artificial Sequence
  chemically synthesized
gcttctttaaccagctggct

SEQ ID NO: 62780 - DNA, 20 bp, Artificial Sequence
  chemically synthesized
ggcttctttaaccagctggc

SEQ ID NO: 62781 - DNA, 20 bp, Artificial Sequence
  chemically synthesized
actttggcttctttaaccag

SEQ ID NO: 62782 - DNA, 20 bp, Artificial Sequence
  chemically synthesized
gactttggcttctttaacca

SEQ ID NO: 62783 - DNA, 20 bp, Artificial Sequence
  chemically synthesized
atgggcaaatcactctccca

SEQ ID NO: 62784 - DNA, 20 bp, Artificial Sequence
  chemically synthesized
catgggcaaatcactctccc

SEQ ID NO: 62785 - DNA, 20 bp, Artificial Sequence
  chemically synthesized
tcatgggcaaatcactctcc

SEQ ID NO: 62786 - DNA, 20 bp, Artificial Sequence
  chemically synthesized
aaacaaggcactcattttca

SEQ ID NO: 62787 - DNA, 20 bp, Artificial Sequence
  chemically synthesized
cactaaaacagccataacaa

SEQ ID NO: 62788 - DNA, 20 bp, Artificial Sequence
  chemically synthesized
gatgtccacaatctaggctg

SEQ ID NO: 62789 - DNA, 20 bp, Artificial Sequence
  chemically synthesized
caggaataaaatatgtcaaa

SEQ ID NO: 62790 - DNA, 20 bp, Artificial Sequence
  chemically synthesized
ccaggaataaaatatgtcaa

SEQ ID NO: 62791 - DNA, 20 bp, Artificial Sequence
  chemically synthesized
tccaggaataaaatatgtca

SEQ ID NO: 62792 - DNA, 20 bp, Artificial Sequence
  chemically synthesized
cctaacacattttccaggaa

SEQ ID NO: 62793 - DNA, 20 bp, Artificial Sequence
  chemically synthesized
acttccctaacacattttcc

SEQ ID NO: 62794 - DNA, 20 bp, Artificial Sequence
  chemically synthesized
tctgtctgcctctgttcact

SEQ ID NO: 62795 - DNA, 20 bp, Artificial Sequence
  chemically synthesized
agtagtgtactgtgttctct

SEQ ID NO: 62796 - DNA, 20 bp, Artificial Sequence
  chemically synthesized
gacttgagtagtgtactgtg

SEQ ID NO: 62797 - DNA, 20 bp, Artificial Sequence
  chemically synthesized
gataaacatgctgttggact

SEQ ID NO: 62798 - DNA, 20 bp, Artificial Sequence
  chemically synthesized
tgctgcagtccttagataaa

SEQ ID NO: 62799 - DNA, 20 bp, Artificial Sequence
  chemically synthesized
ctgctgcagtccttagataa

SEQ ID NO: 62800 - DNA, 20 bp, Artificial Sequence
  chemically synthesized
tggagtgctttctgctgcag

SEQ ID NO: 62801 - DNA, 20 bp, Artificial Sequence
  chemically synthesized
atggagtgctttctgctgca

SEQ ID NO: 62802 - DNA, 20 bp, Artificial Sequence
  chemically synthesized
ctgcatctatttatggagtg

SEQ ID NO: 62803 - DNA, 20 bp, Artificial Sequence
  chemically synthesized
tgggagcttcctgcatctat

SEQ ID NO: 62804 - DNA, 20 bp, Artificial Sequence
  chemically synthesized
atgggagcttcctgcatcta

SEQ ID NO: 62805 - DNA, 20 bp, Artificial Sequence
  chemically synthesized
tcaatttatgggagcttcct

SEQ ID NO: 62806 - DNA, 20 bp, Artificial Sequence
  chemically synthesized
gtcaatttatgggagcttcc

SEQ ID NO: 62807 - DNA, 20 bp, Artificial Sequence
  chemically synthesized
tgtcaatttatgggagcttc

SEQ ID NO: 62808 - DNA, 20 bp, Artificial Sequence
  chemically synthesized
ttgtcaatttatgggagctt

SEQ ID NO: 62809 - DNA, 20 bp, Artificial Sequence
  chemically synthesized
cagtttttgtcaatttatgg

SEQ ID NO: 62810 - DNA, 20 bp, Artificial Sequence
  chemically synthesized
tccacagtctatagtccaaa

SEQ ID NO: 62811 - DNA, 20 bp, Artificial Sequence
  chemically synthesized
catagacactgagacaattc

SEQ ID NO: 62812 - DNA, 20 bp, Artificial Sequence
  chemically synthesized
ctacattccatagacactga

SEQ ID NO: 62813 - DNA, 20 bp, Artificial Sequence
  chemically synthesized
gtgtcctagtgagcaaagta

SEQ ID NO: 62814 - DNA, 20 bp, Artificial Sequence
  chemically synthesized
gttagtgtcctagtgagcaa

SEQ ID NO: 62815 - DNA, 20 bp, Artificial Sequence
  chemically synthesized
agttagtgtcctagtgagca

SEQ ID NO: 62816 - DNA, 20 bp, Artificial Sequence
  chemically synthesized
tagttagtgtcctagtgagc

SEQ ID NO: 62817 - DNA, 20 bp, Artificial Sequence
  chemically synthesized
ttagttagtgtcctagtgag

SEQ ID NO: 62818 - DNA, 20 bp, Artificial Sequence
  chemically synthesized
atatccgaatgacctacttt

SEQ ID NO: 62819 - DNA, 20 bp, Artificial Sequence
  chemically synthesized
tgacctgaggctatctccaa

SEQ ID NO: 62820 - DNA, 20 bp, Artificial Sequence
  chemically synthesized
aaattctgacctgaggctat

SEQ ID NO: 62821 - DNA, 20 bp, Artificial Sequence
  chemically synthesized
agaaactactctagcttgaa

SEQ ID NO: 62822 - DNA, 20 bp, Artificial Sequence
  chemically synthesized
gagaaactactctagcttga

SEQ ID NO: 62823 - DNA, 20 bp, Artificial Sequence
  chemically synthesized
ctatctctggtgatttgaga

SEQ ID NO: 62824 - DNA, 20 bp, Artificial Sequence
  chemically synthesized
ccaagggttactatctctgg

SEQ ID NO: 62825 - DNA, 20 bp, Artificial Sequence
  chemically synthesized
ttgccaagggttactatctc

SEQ ID NO: 62826 - DNA, 20 bp, Artificial Sequence
  chemically synthesized
atccataagtcatctcttgt

SEQ ID NO: 62827 - DNA, 20 bp, Artificial Sequence
  chemically synthesized
tccttcatccataagtcatc

SEQ ID NO: 62828 - DNA, 20 bp, Artificial Sequence
  chemically synthesized
tccttctccttcatccataa

SEQ ID NO: 62829 - DNA, 20 bp, Artificial Sequence
  chemically synthesized
tcttctccttctccttcatc

SEQ ID NO: 62830 - DNA, 20 bp, Artificial Sequence
  chemically synthesized
atcttctccttctccttcat

SEQ ID NO: 62831 - DNA, 20 bp, Artificial Sequence
  chemically synthesized
ctaaaggtctcagggaactt

SEQ ID NO: 62832 - DNA, 20 bp, Artificial Sequence
  chemically synthesized
actaaaggtctcagggaact

SEQ ID NO: 62833 - DNA, 20 bp, Artificial Sequence
  chemically synthesized
aaagtttactaaaggtctca

SEQ ID NO: 62834 - DNA, 20 bp, Artificial Sequence
  chemically synthesized
gaaagtttactaaaggtctc

SEQ ID NO: 62835 - DNA, 20 bp, Artificial Sequence
  chemically synthesized
acaaggtctcacagaaaaga

SEQ ID NO: 62836 - DNA, 20 bp, Artificial Sequence
  chemically synthesized
cacaaggtctcacagaaaag

SEQ ID NO: 62837 - DNA, 20 bp, Artificial Sequence
  chemically synthesized
tttcacaaggtctcacagaa

SEQ ID NO: 62838 - DNA, 20 bp, Artificial Sequence
  chemically synthesized
gtttcacaaggtctcacaga

SEQ ID NO: 62839 - DNA, 20 bp, Artificial Sequence
  chemically synthesized
tgtttcacaaggtctcacag

SEQ ID NO: 62840 - DNA, 20 bp, Artificial Sequence
  chemically synthesized
gcattttgtttcacaaggtc

SEQ ID NO: 62841 - DNA, 20 bp, Artificial Sequence
  chemically synthesized
caaaaatccacaggaataag

SEQ ID NO: 62842 - DNA, 20 bp, Artificial Sequence
  chemically synthesized
ccaaaaatccacaggaataa

SEQ ID NO: 62843 - DNA, 20 bp, Artificial Sequence
  chemically synthesized
tccaaaaatccacaggaata

SEQ ID NO: 62844 - DNA, 20 bp, Artificial Sequence
  chemically synthesized
agatgatcctctcaatgtaa

SEQ ID NO: 62845 - DNA, 20 bp, Artificial Sequence
  chemically synthesized
acttcagatgatcctctcaa

SEQ ID NO: 62846 - DNA, 20 bp, Artificial Sequence
  chemically synthesized
gacttcagatgatcctctca

SEQ ID NO: 62847 - DNA, 20 bp, Artificial Sequence
  chemically synthesized
acacaatttgacttcagatg

SEQ ID NO: 62848 - DNA, 20 bp, Artificial Sequence
  chemically synthesized
taccatcttgacacaatttg

SEQ ID NO: 62849 - DNA, 20 bp, Artificial Sequence
  chemically synthesized
acctaacttctaccatcttg

SEQ ID NO: 62850 - DNA, 20 bp, Artificial Sequence
  chemically synthesized
tgtgaatattgacctaactt

SEQ ID NO: 62851 - DNA, 20 bp, Artificial Sequence
  chemically synthesized
taattctgtgaatattgacc

SEQ ID NO: 62852 - DNA, 20 bp, Artificial Sequence
  chemically synthesized
aattataattctgtgaatat

SEQ ID NO: 62853 - DNA, 20 bp, Artificial Sequence
  chemically synthesized
caaatagtcggccagtgaat

SEQ ID NO: 62854 - DNA, 20 bp, Artificial Sequence
  chemically synthesized
atcatataaatcattccaaa

SEQ ID NO: 62855 - DNA, 20 bp, Artificial Sequence
  chemically synthesized
catcatataaatcattccaa

SEQ ID NO: 62856 - DNA, 20 bp, Artificial Sequence
  chemically synthesized
aataatttcatcatataaat

SEQ ID NO: 62857 - DNA, 20 bp, Artificial Sequence
  chemically synthesized
ctcacctgtaaaatgagata

SEQ ID NO: 62858 - DNA, 20 bp, Artificial Sequence
  chemically synthesized
cctcacctgtaaaatgagat

SEQ ID NO: 62859 - DNA, 20 bp, Artificial Sequence
  chemically synthesized
tgtaatgtatctatgcctca

SEQ ID NO: 62860 - DNA, 20 bp, Artificial Sequence
  chemically synthesized
acctagagaaagttatgtaa

SEQ ID NO: 62861 - DNA, 20 bp, Artificial Sequence
  chemically synthesized
gacctagagaaagttatgta

SEQ ID NO: 62862 - DNA, 20 bp, Artificial Sequence
  chemically synthesized
tgacctagagaaagttatgt

SEQ ID NO: 62863 - DNA, 20 bp, Artificial Sequence
  chemically synthesized
ttgacctagagaaagttatg

SEQ ID NO: 62864 - DNA, 20 bp, Artificial Sequence
  chemically synthesized
tttgacctagagaaagttat

SEQ ID NO: 62865 - DNA, 20 bp, Artificial Sequence
  chemically synthesized
ctagttttttgacctagaga

SEQ ID NO: 62866 - DNA, 20 bp, Artificial Sequence
  chemically synthesized
caatcccaataccagtgctt

SEQ ID NO: 62867 - DNA, 20 bp, Artificial Sequence
  chemically synthesized
ccaatcccaataccagtgct

SEQ ID NO: 62868 - DNA, 20 bp, Artificial Sequence
  chemically synthesized
tttccaatcccaataccagt

SEQ ID NO: 62869 - DNA, 20 bp, Artificial Sequence
  chemically synthesized
aactgccttgtttccaatcc

SEQ ID NO: 62870 - DNA, 20 bp, Artificial Sequence
  chemically synthesized
catctgagagttaaactgcc

SEQ ID NO: 62871 - DNA, 20 bp, Artificial Sequence
  chemically synthesized
aagttgcatctgagagttaa

SEQ ID NO: 62872 - DNA, 20 bp, Artificial Sequence
  chemically synthesized
cccaacacgagacaatccag

SEQ ID NO: 62873 - DNA, 20 bp, Artificial Sequence
  chemically synthesized
gcccaacacgagacaatcca

SEQ ID NO: 62874 - DNA, 20 bp, Artificial Sequence
  chemically synthesized
tcaccaaaaatctgtttgcc

SEQ ID NO: 62875 - DNA, 20 bp, Artificial Sequence
  chemically synthesized
aatcctgcgtctcctacaac

SEQ ID NO: 62876 - DNA, 20 bp, Artificial Sequence
  chemically synthesized
aaatcctgcgtctcctacaa

SEQ ID NO: 62877 - DNA, 20 bp, Artificial Sequence
  chemically synthesized
atatcagaatttaaatcctg

SEQ ID NO: 62878 - DNA, 20 bp, Artificial Sequence
  chemically synthesized
gggatcccacatccctccca

SEQ ID NO: 62879 - DNA, 20 bp, Artificial Sequence
  chemically synthesized
agaccctgagactcagtcaa

SEQ ID NO: 62880 - DNA, 20 bp, Artificial Sequence
  chemically synthesized
cagaccctgagactcagtca

SEQ ID NO: 62881 - DNA, 20 bp, Artificial Sequence
  chemically synthesized
agctttcagaccctgagact

SEQ ID NO: 62882 - DNA, 20 bp, Artificial Sequence
  chemically synthesized
accaaaaacactcatacaaa

SEQ ID NO: 62883 - DNA, 20 bp, Artificial Sequence
  chemically synthesized
tccttcaccaaaaacactca

SEQ ID NO: 62884 - DNA, 20 bp, Artificial Sequence
  chemically synthesized
ccaaaggcctcctgaaactc

SEQ ID NO: 62885 - DNA, 20 bp, Artificial Sequence
  chemically synthesized
acatctaaggaattcccaaa

SEQ ID NO: 62886 - DNA, 20 bp, Artificial Sequence
  chemically synthesized
acaaatgttaacatctaagg

SEQ ID NO: 62887 - DNA, 20 bp, Artificial Sequence
  chemically synthesized
atagccacaaaagaaagaat

SEQ ID NO: 62888 - DNA, 20 bp, Artificial Sequence
  chemically synthesized
aatagccacaaaagaaagaa

SEQ ID NO: 62889 - DNA, 20 bp, Artificial Sequence
  chemically synthesized
taatagccacaaaagaaaga

SEQ ID NO: 62890 - DNA, 20 bp, Artificial Sequence
  chemically synthesized
ttaatagccacaaaagaaag

SEQ ID NO: 62891 - DNA, 20 bp, Artificial Sequence
  chemically synthesized
atatgctctttttaatagcc

SEQ ID NO: 62892 - DNA, 20 bp, Artificial Sequence
  chemically synthesized
catatgctctttttaatagc

SEQ ID NO: 62893 - DNA, 20 bp, Artificial Sequence
  chemically synthesized
tcatatgctctttttaatag

SEQ ID NO: 62894 - DNA, 20 bp, Artificial Sequence
  chemically synthesized
gacatcctctgtctctcttt

SEQ ID NO: 62895 - DNA, 20 bp, Artificial Sequence
  chemically synthesized
cttagacatcctctgtctct

SEQ ID NO: 62896 - DNA, 20 bp, Artificial Sequence
  chemically synthesized
atggttgcttagacatcctc

SEQ ID NO: 62897 - DNA, 20 bp, Artificial Sequence
  chemically synthesized
aatggttgcttagacatcct

SEQ ID NO: 62898 - DNA, 20 bp, Artificial Sequence
  chemically synthesized
taatggttgcttagacatcc

SEQ ID NO: 62899 - DNA, 20 bp, Artificial Sequence
  chemically synthesized
aaatatggtgagggatggtg

SEQ ID NO: 62900 - DNA, 20 bp, Artificial Sequence
  chemically synthesized
gaaatatggtgagggatggt

SEQ ID NO: 62901 - DNA, 20 bp, Artificial Sequence
  chemically synthesized
aggacccagatgtcaacatc

SEQ ID NO: 62902 - DNA, 20 bp, Artificial Sequence
  chemically synthesized
gaggacccagatgtcaacat

SEQ ID NO: 62903 - DNA, 20 bp, Artificial Sequence
  chemically synthesized
tgaggacccagatgtcaaca

SEQ ID NO: 62904 - DNA, 20 bp, Artificial Sequence
  chemically synthesized
gaagtgaatggatcgcagca

SEQ ID NO: 62905 - DNA, 20 bp, Artificial Sequence
  chemically synthesized
tcatgctatagccagttgga

SEQ ID NO: 62906 - DNA, 20 bp, Artificial Sequence
  chemically synthesized
gaagatgcagaactggatga

SEQ ID NO: 62907 - DNA, 20 bp, Artificial Sequence
  chemically synthesized
ctccccaggagacttggaag

SEQ ID NO: 62908 - DNA, 20 bp, Artificial Sequence
  chemically synthesized
ttcctccccaggagacttgg

SEQ ID NO: 62909 - DNA, 20 bp, Artificial Sequence
  chemically synthesized
gttcctccccaggagacttg

SEQ ID NO: 62910 - DNA, 20 bp, Artificial Sequence
  chemically synthesized
acagctgcatgtttgttcct

SEQ ID NO: 62911 - DNA, 20 bp, Artificial Sequence
  chemically synthesized
attaacagctgcatgtttgt

SEQ ID NO: 62912 - DNA, 20 bp, Artificial Sequence
  chemically synthesized
cattaacagctgcatgtttg

SEQ ID NO: 62913 - DNA, 20 bp, Artificial Sequence
  chemically synthesized
tttcattaacagctgcatgt

SEQ ID NO: 62914 - DNA, 20 bp, Artificial Sequence
  chemically synthesized
gtttcattaacagctgcatg

SEQ ID NO: 62915 - DNA, 20 bp, Artificial Sequence
  chemically synthesized
tttgtttcattaacagctgc

SEQ ID NO: 62916 - DNA, 20 bp, Artificial Sequence
  chemically synthesized
atttgtttcattaacagctg

SEQ ID NO: 62917 - DNA, 20 bp, Artificial Sequence
  chemically synthesized
aaaaggatgcatttatttgt

SEQ ID NO: 62918 - DNA, 20 bp, Artificial Sequence
  chemically synthesized
caaaaggatgcatttatttg

SEQ ID NO: 62919 - DNA, 20 bp, Artificial Sequence
  chemically synthesized
aggtcatgccatatttcaaa

SEQ ID NO: 62920 - DNA, 20 bp, Artificial Sequence
  chemically synthesized
ttaaggtcatgccatatttc

SEQ ID NO: 62921 - DNA, 20 bp, Artificial Sequence
  chemically synthesized
attaaggtcatgccatattt

SEQ ID NO: 62922 - DNA, 20 bp, Artificial Sequence
  chemically synthesized
tattaaggtcatgccatatt

SEQ ID NO: 62923 - DNA, 20 bp, Artificial Sequence
  chemically synthesized
atgtctgccacagagtctgc

SEQ ID NO: 62924 - DNA, 20 bp, Artificial Sequence
  chemically synthesized
catgtctgccacagagtctg

SEQ ID NO: 62925 - DNA, 20 bp, Artificial Sequence
  chemically synthesized
ctatttcatgtctgccacag

SEQ ID NO: 62926 - DNA, 20 bp, Artificial Sequence
  chemically synthesized
aatactacataatccattac

SEQ ID NO: 62927 - DNA, 20 bp, Artificial Sequence
  chemically synthesized
cttgaatactacataatcca

SEQ ID NO: 62928 - DNA, 20 bp, Artificial Sequence
  chemically synthesized
ttccttgaatactacataat

SEQ ID NO: 62929 - DNA, 20 bp, Artificial Sequence
  chemically synthesized
cttccttgaatactacataa

SEQ ID NO: 62930 - DNA, 20 bp, Artificial Sequence
  chemically synthesized
tcttccttgaatactacata

SEQ ID NO: 62931 - DNA, 20 bp, Artificial Sequence
  chemically synthesized
ggcttttcttccttgaatac

SEQ ID NO: 62932 - DNA, 20 bp, Artificial Sequence
  chemically synthesized
cccttgggcttttcttcctt

SEQ ID NO: 62933 - DNA, 20 bp, Artificial Sequence
  chemically synthesized
gcccttgggcttttcttcct

SEQ ID NO: 62934 - DNA, 20 bp, Artificial Sequence
  chemically synthesized
tctttgcccttgggcttttc

SEQ ID NO: 62935 - DNA, 20 bp, Artificial Sequence
  chemically synthesized
ttgtctttgcccttgggctt

SEQ ID NO: 62936 - DNA, 20 bp, Artificial Sequence
  chemically synthesized
cttgtctttgcccttgggct

SEQ ID NO: 62937 - DNA, 20 bp, Artificial Sequence
  chemically synthesized
tcttgtctttgcccttgggc

SEQ ID NO: 62938 - DNA, 20 bp, Artificial Sequence
  chemically synthesized
ttcttgtctttgcccttggg

SEQ ID NO: 62939 - DNA, 20 bp, Artificial Sequence
  chemically synthesized
aagcatttttcttgtctttg

SEQ ID NO: 62940 - DNA, 20 bp, Artificial Sequence
  chemically synthesized
gaagcatttttcttgtcttt

SEQ ID NO: 62941 - DNA, 20 bp, Artificial Sequence
  chemically synthesized
tgaagcatttttcttgtctt

SEQ ID NO: 62942 - DNA, 20 bp, Artificial Sequence
  chemically synthesized
gttttgaagcatttttcttg

SEQ ID NO: 62943 - DNA, 20 bp, Artificial Sequence
  chemically synthesized
gttggttttgaagcattttt

SEQ ID NO: 62944 - DNA, 20 bp, Artificial Sequence
  chemically synthesized
gttggttggttttgaagcat

SEQ ID NO: 62945 - DNA, 20 bp, Artificial Sequence
  chemically synthesized
ttggttggttggttttgaag

SEQ ID NO: 62946 - DNA, 20 bp, Artificial Sequence
  chemically synthesized
gttggttggttggttttgaa

SEQ ID NO: 62947 - DNA, 20 bp, Artificial Sequence
  chemically synthesized
tgttggttggttggttttga

SEQ ID NO: 62948 - DNA, 20 bp, Artificial Sequence
  chemically synthesized
ttgttggttggttggttttg

SEQ ID NO: 62949 - DNA, 20 bp, Artificial Sequence
  chemically synthesized
tttgttggttggttggtttt

SEQ ID NO: 62950 - DNA, 20 bp, Artificial Sequence
  chemically synthesized
ttttttgttggttggttggt

SEQ ID NO: 62951 - DNA, 20 bp, Artificial Sequence
  chemically synthesized
gttttttgttggttggttgg

SEQ ID NO: 62952 - DNA, 20 bp, Artificial Sequence
  chemically synthesized
tgttttttgttggttggttg

SEQ ID NO: 62953 - DNA, 20 bp, Artificial Sequence
  chemically synthesized
ttgttttttgttggttggtt

SEQ ID NO: 62954 - DNA, 20 bp, Artificial Sequence
  chemically synthesized
tttgttttttgttggttggt

SEQ ID NO: 62955 - DNA, 20 bp, Artificial Sequence
  chemically synthesized
ttttttgttttttgttggtt

SEQ ID NO: 62956 - DNA, 20 bp, Artificial Sequence
  chemically synthesized
gttttttgttttttgttggt

SEQ ID NO: 62957 - DNA, 20 bp, Artificial Sequence
  chemically synthesized
tgttttttgttttttgttgg

SEQ ID NO: 62958 - DNA, 20 bp, Artificial Sequence
  chemically synthesized
ttgttttttgttttttgttg

SEQ ID NO: 62959 - DNA, 20 bp, Artificial Sequence
  chemically synthesized
agcgtttttgttttttgttt

SEQ ID NO: 62960 - DNA, 20 bp, Artificial Sequence
  chemically synthesized
gcattgagcgtttttgtttt

SEQ ID NO: 62961 - DNA, 20 bp, Artificial Sequence
  chemically synthesized
gaaaactctgttagcattga

SEQ ID NO: 62962 - DNA, 20 bp, Artificial Sequence
  chemically synthesized
tattggaaaactctgttagc

SEQ ID NO: 62963 - DNA, 20 bp, Artificial Sequence
  chemically synthesized
ctattggaaaactctgttag

SEQ ID NO: 62964 - DNA, 20 bp, Artificial Sequence
  chemically synthesized
tctattggaaaactctgtta

SEQ ID NO: 62965 - DNA, 20 bp, Artificial Sequence
  chemically synthesized
ttctattggaaaactctgtt

SEQ ID NO: 62966 - DNA, 20 bp, Artificial Sequence
  chemically synthesized
tttctattggaaaactctgt

SEQ ID NO: 62967 - DNA, 20 bp, Artificial Sequence
  chemically synthesized
ttttctattggaaaactctg

SEQ ID NO: 62968 - DNA, 20 bp, Artificial Sequence
  chemically synthesized
tttttctattggaaaactct

SEQ ID NO: 62969 - DNA, 20 bp, Artificial Sequence
  chemically synthesized
ttttttctattggaaaactc

SEQ ID NO: 62970 - DNA, 20 bp, Artificial Sequence
  chemically synthesized
tttttttctattggaaaact

SEQ ID NO: 62971 - DNA, 20 bp, Artificial Sequence
  chemically synthesized
tgatggattttttttttcta

SEQ ID NO: 62972 - DNA, 20 bp, Artificial Sequence
  chemically synthesized
ctcattatgatggatttttt

SEQ ID NO: 62973 - DNA, 20 bp, Artificial Sequence
  chemically synthesized
cttactcattatgatggatt

SEQ ID NO: 62974 - DNA, 20 bp, Artificial Sequence
  chemically synthesized
gaggttacttactcattatg

SEQ ID NO: 62975 - DNA, 20 bp, Artificial Sequence
  chemically synthesized
ggaggttacttactcattat

SEQ ID NO: 62976 - DNA, 20 bp, Artificial Sequence
  chemically synthesized
actcagaaatatttggaggt

SEQ ID NO: 62977 - DNA, 20 bp, Artificial Sequence
  chemically synthesized
aactcagaaatatttggagg

SEQ ID NO: 62978 - DNA, 20 bp, Artificial Sequence
  chemically synthesized
tttaactcagaaatatttgg

SEQ ID NO: 62979 - DNA, 20 bp, Artificial Sequence
  chemically synthesized
aatgcctctggttctttaac

SEQ ID NO: 62980 - DNA, 20 bp, Artificial Sequence
  chemically synthesized
aatacagaaaagaatgtgtt

SEQ ID NO: 62981 - DNA, 20 bp, Artificial Sequence
  chemically synthesized
aaatacagaaaagaatgtgt

SEQ ID NO: 62982 - DNA, 20 bp, Artificial Sequence
  chemically synthesized
aaataatatgaacaatcaat

SEQ ID NO: 62983 - DNA, 20 bp, Artificial Sequence
  chemically synthesized
gaaataatatgaacaatcaa

SEQ ID NO: 62984 - DNA, 20 bp, Artificial Sequence
  chemically synthesized
tttgaaataatatgaacaat

SEQ ID NO: 62985 - DNA, 20 bp, Artificial Sequence
  chemically synthesized
ggtagcatggggataatgga

SEQ ID NO: 62986 - DNA, 20 bp, Artificial Sequence
  chemically synthesized
taataaagtgaaaagtgaga

SEQ ID NO: 62987 - DNA, 20 bp, Artificial Sequence
  chemically synthesized
gtaataaagtgaaaagtgag

SEQ ID NO: 62988 - DNA, 20 bp, Artificial Sequence
  chemically synthesized
tgatttgtaataaagtgaaa

SEQ ID NO: 62989 - DNA, 20 bp, Artificial Sequence
  chemically synthesized
agacaaaaaaaatactaggg

SEQ ID NO: 62990 - DNA, 20 bp, Artificial Sequence
  chemically synthesized
aagacaaaaaaaatactagg

SEQ ID NO: 62991 - DNA, 20 bp, Artificial Sequence
  chemically synthesized
atttaagacaaaaaaaatac

SEQ ID NO: 62992 - DNA, 20 bp, Artificial Sequence
  chemically synthesized
tccttcatttaagacaaaaa

SEQ ID NO: 62993 - DNA, 20 bp, Artificial Sequence
  chemically synthesized
tgactgcaagatagctatca

SEQ ID NO: 62994 - DNA, 20 bp, Artificial Sequence
  chemically synthesized
aaaaagcaaaattctgactg

SEQ ID NO: 62995 - DNA, 20 bp, Artificial Sequence
  chemically synthesized
ggcaagggaaagtgacctct

SEQ ID NO: 62996 - DNA, 20 bp, Artificial Sequence
  chemically synthesized
aggcaagggaaagtgacctc

SEQ ID NO: 62997 - DNA, 20 bp, Artificial Sequence
  chemically synthesized
taggcaagggaaagtgacct

SEQ ID NO: 62998 - DNA, 20 bp, Artificial Sequence
  chemically synthesized
ttaggcaagggaaagtgacc

SEQ ID NO: 62999 - DNA, 20 bp, Artificial Sequence
  chemically synthesized
ggatgcctttttaggcaagg

SEQ ID NO: 63000 - DNA, 20 bp, Artificial Sequence
  chemically synthesized
attgggatgcctttttaggc

SEQ ID NO: 63001 - DNA, 20 bp, Artificial Sequence
  chemically synthesized
aattgggatgcctttttagg

SEQ ID NO: 63002 - DNA, 20 bp, Artificial Sequence
  chemically synthesized
taattgggatgcctttttag

SEQ ID NO: 63003 - DNA, 20 bp, Artificial Sequence
  chemically synthesized
agacaatggaaataatcagt

SEQ ID NO: 63004 - DNA, 20 bp, Artificial Sequence
  chemically synthesized
tctcagtcagtagcttaaga

SEQ ID NO: 63005 - DNA, 20 bp, Artificial Sequence
  chemically synthesized
gtctcagtcagtagcttaag

SEQ ID NO: 63006 - DNA, 20 bp, Artificial Sequence
  chemically synthesized
cctaatcacgtttgtctcag

SEQ ID NO: 63007 - DNA, 20 bp, Artificial Sequence
  chemically synthesized
ccctaatcacgtttgtctca

SEQ ID NO: 63008 - DNA, 20 bp, Artificial Sequence
  chemically synthesized
tccctaatcacgtttgtctc

SEQ ID NO: 63009 - DNA, 20 bp, Artificial Sequence
  chemically synthesized
ttccctaatcacgtttgtct

SEQ ID NO: 63010 - DNA, 20 bp, Artificial Sequence
  chemically synthesized
tttccctaatcacgtttgtc

SEQ ID NO: 63011 - DNA, 20 bp, Artificial Sequence
  chemically synthesized
ttttccctaatcacgtttgt

SEQ ID NO: 63012 - DNA, 20 bp, Artificial Sequence
  chemically synthesized
tttttccctaatcacgtttg

SEQ ID NO: 63013 - DNA, 20 bp, Artificial Sequence
  chemically synthesized
accaaatcggagtcctgcca

SEQ ID NO: 63014 - DNA, 20 bp, Artificial Sequence
  chemically synthesized
caccaaatcggagtcctgcc

SEQ ID NO: 63015 - DNA, 20 bp, Artificial Sequence
  chemically synthesized
acaggaagtttcaccaaatc

SEQ ID NO: 63016 - DNA, 20 bp, Artificial Sequence
  chemically synthesized
cagcatcctgctagaatcta

SEQ ID NO: 63017 - DNA, 20 bp, Artificial Sequence
  chemically synthesized
ttccagcatcctgctagaat

SEQ ID NO: 63018 - DNA, 20 bp, Artificial Sequence
  chemically synthesized
cttccagcatcctgctagaa

SEQ ID NO: 63019 - DNA, 20 bp, Artificial Sequence
  chemically synthesized
cccactttcttccagcatcc

SEQ ID NO: 63020 - DNA, 20 bp, Artificial Sequence
  chemically synthesized
caaaagtaatagcaaaaaaa

SEQ ID NO: 63021 - DNA, 20 bp, Artificial Sequence
  chemically synthesized
ccaaaagtaatagcaaaaaa

SEQ ID NO: 63022 - DNA, 20 bp, Artificial Sequence
  chemically synthesized
agaaaccaaatactatgtgt

SEQ ID NO: 63023 - DNA, 20 bp, Artificial Sequence
  chemically synthesized
tagggtctacaaaacagctt

SEQ ID NO: 63024 - DNA, 20 bp, Artificial Sequence
  chemically synthesized
attatagggtctacaaaaca

SEQ ID NO: 63025 - DNA, 20 bp, Artificial Sequence
  chemically synthesized
cattatagggtctacaaaac

SEQ ID NO: 63026 - DNA, 20 bp, Artificial Sequence
  chemically synthesized
tatcatgtaaaacatacata

SEQ ID NO: 63027 - DNA, 20 bp, Artificial Sequence
  chemically synthesized
ctatcatgtaaaacatacat

SEQ ID NO: 63028 - DNA, 20 bp, Artificial Sequence
  chemically synthesized
cagcctcactttctatcatg

SEQ ID NO: 63029 - DNA, 20 bp, Artificial Sequence
  chemically synthesized
ttccagcctcactttctatc

SEQ ID NO: 63030 - DNA, 20 bp, Artificial Sequence
  chemically synthesized
attccagcctcactttctat

SEQ ID NO: 63031 - DNA, 20 bp, Artificial Sequence
  chemically synthesized
tgacatatttattccagcct

SEQ ID NO: 63032 - DNA, 20 bp, Artificial Sequence
  chemically synthesized
ctgacatatttattccagcc

SEQ ID NO: 63033 - DNA, 20 bp, Artificial Sequence
  chemically synthesized
tctgacatatttattccagc

SEQ ID NO: 63034 - DNA, 20 bp, Artificial Sequence
  chemically synthesized
tcaggtcccagtgggtgtat

SEQ ID NO: 63035 - DNA, 20 bp, Artificial Sequence
  chemically synthesized
ctcaggtcccagtgggtgta

SEQ ID NO: 63036 - DNA, 20 bp, Artificial Sequence
  chemically synthesized
tctcaggtcccagtgggtgt

SEQ ID NO: 63037 - DNA, 20 bp, Artificial Sequence
  chemically synthesized
ctccagattttctcaggtcc

SEQ ID NO: 63038 - DNA, 20 bp, Artificial Sequence
  chemically synthesized
cttactccagattttctcag

SEQ ID NO: 63039 - DNA, 20 bp, Artificial Sequence
  chemically synthesized
gcttactccagattttctca

SEQ ID NO: 63040 - DNA, 20 bp, Artificial Sequence
  chemically synthesized
agcactctgagaatggcttt

SEQ ID NO: 63041 - DNA, 20 bp, Artificial Sequence
  chemically synthesized
tagtactgatgaaccaaaaa

SEQ ID NO: 63042 - DNA, 20 bp, Artificial Sequence
  chemically synthesized
ctagtactgatgaaccaaaa

SEQ ID NO: 63043 - DNA, 20 bp, Artificial Sequence
  chemically synthesized
gaagcatctaatttctagta

SEQ ID NO: 63044 - DNA, 20 bp, Artificial Sequence
  chemically synthesized
tgtctccagtgtaaagcctt

SEQ ID NO: 63045 - DNA, 20 bp, Artificial Sequence
  chemically synthesized
gtatattctgtctccagtgt

SEQ ID NO: 63046 - DNA, 20 bp, Artificial Sequence
  chemically synthesized
agtatattctgtctccagtg

SEQ ID NO: 63047 - DNA, 20 bp, Artificial Sequence
  chemically synthesized
tagtatattctgtctccagt

SEQ ID NO: 63048 - DNA, 20 bp, Artificial Sequence
  chemically synthesized
attttagtatattctgtctc

SEQ ID NO: 63049 - DNA, 20 bp, Artificial Sequence
  chemically synthesized
gattttagtatattctgtct

SEQ ID NO: 63050 - DNA, 20 bp, Artificial Sequence
  chemically synthesized
gtctctgggacaatcaactg

SEQ ID NO: 63051 - DNA, 20 bp, Artificial Sequence
  chemically synthesized
ggacagcccttggtctctgg

SEQ ID NO: 63052 - DNA, 20 bp, Artificial Sequence
  chemically synthesized
agtaaagaaagtgctattcg

SEQ ID NO: 63053 - DNA, 20 bp, Artificial Sequence
  chemically synthesized
aagtaaagaaagtgctattc

SEQ ID NO: 63054 - DNA, 20 bp, Artificial Sequence
  chemically synthesized
tttaagtaaagaaagtgcta

SEQ ID NO: 63055 - DNA, 20 bp, Artificial Sequence
  chemically synthesized
cctactgagttatttaagta

SEQ ID NO: 63056 - DNA, 20 bp, Artificial Sequence
  chemically synthesized
ccctactgagttatttaagt

SEQ ID NO: 63057 - DNA, 20 bp, Artificial Sequence
  chemically synthesized
tccctactgagttatttaag

SEQ ID NO: 63058 - DNA, 20 bp, Artificial Sequence
  chemically synthesized
ccattttccctactgagtta

SEQ ID NO: 63059 - DNA, 20 bp, Artificial Sequence
  chemically synthesized
cccattttccctactgagtt

SEQ ID NO: 63060 - DNA, 20 bp, Artificial Sequence
  chemically synthesized
actttcccattttccctact

SEQ ID NO: 63061 - DNA, 20 bp, Artificial Sequence
  chemically synthesized
ttaactttcccattttccct

SEQ ID NO: 63062 - DNA, 20 bp, Artificial Sequence
  chemically synthesized
attaactttcccattttccc

SEQ ID NO: 63063 - DNA, 20 bp, Artificial Sequence
  chemically synthesized
acagtcagctttattaactt

SEQ ID NO: 63064 - DNA, 20 bp, Artificial Sequence
  chemically synthesized
gtccattcacagtcagcttt

SEQ ID NO: 63065 - DNA, 20 bp, Artificial Sequence
  chemically synthesized
aactggttggtccattcaca

SEQ ID NO: 63066 - DNA, 20 bp, Artificial Sequence
  chemically synthesized
actgaaccaacctgtcattc

SEQ ID NO: 63067 - DNA, 20 bp, Artificial Sequence
  chemically synthesized
gactgaaccaacctgtcatt

SEQ ID NO: 63068 - DNA, 20 bp, Artificial Sequence
  chemically synthesized
ctttgactgaaccaacctgt

SEQ ID NO: 63069 - DNA, 20 bp, Artificial Sequence
  chemically synthesized
ttgctttgactgaaccaacc

SEQ ID NO: 63070 - DNA, 20 bp, Artificial Sequence
  chemically synthesized
gttgctttgactgaaccaac

SEQ ID NO: 63071 - DNA, 20 bp, Artificial Sequence
  chemically synthesized
agatttgttgctttgactga

SEQ ID NO: 63072 - DNA, 20 bp, Artificial Sequence
  chemically synthesized
gagatttgttgctttgactg

SEQ ID NO: 63073 - DNA, 20 bp, Artificial Sequence
  chemically synthesized
tgagcagtgcccacacccat

SEQ ID NO: 63074 - DNA, 20 bp, Artificial Sequence
  chemically synthesized
tgggaatggccagaaaaaca

SEQ ID NO: 63075 - DNA, 20 bp, Artificial Sequence
  chemically synthesized
ctggtggcagaactgtgaac

SEQ ID NO: 63076 - DNA, 20 bp, Artificial Sequence
  chemically synthesized
gctggtggcagaactgtgaa

SEQ ID NO: 63077 - DNA, 20 bp, Artificial Sequence
  chemically synthesized
tgctggtggcagaactgtga

SEQ ID NO: 63078 - DNA, 20 bp, Artificial Sequence
  chemically synthesized
gtgctgtcatcagaaggagg

SEQ ID NO: 63079 - DNA, 20 bp, Artificial Sequence
  chemically synthesized
cgtgctgtcatcagaaggag

SEQ ID NO: 63080 - DNA, 20 bp, Artificial Sequence
  chemically synthesized
tttcgtgctgtcatcagaag

SEQ ID NO: 63081 - DNA, 20 bp, Artificial Sequence
  chemically synthesized
gtgggctgtctctcattatt

SEQ ID NO: 63082 - DNA, 20 bp, Artificial Sequence
  chemically synthesized
gaaagctaccactgcacagg

SEQ ID NO: 63083 - DNA, 20 bp, Artificial Sequence
  chemically synthesized
agaaagctaccactgcacag

SEQ ID NO: 63084 - DNA, 20 bp, Artificial Sequence
  chemically synthesized
gtggaagagaaaatgtcagg

SEQ ID NO: 63085 - DNA, 20 bp, Artificial Sequence
  chemically synthesized
tgtgtatagaattggtggaa

SEQ ID NO: 63086 - DNA, 20 bp, Artificial Sequence
  chemically synthesized
aagaatcgtgaagacaaagc

SEQ ID NO: 63087 - DNA, 20 bp, Artificial Sequence
  chemically synthesized
tgtgggtgctgacatctgct

SEQ ID NO: 63088 - DNA, 20 bp, Artificial Sequence
  chemically synthesized
ttatgtgggtgctgacatct

SEQ ID NO: 63089 - DNA, 20 bp, Artificial Sequence
  chemically synthesized
gttatgtgggtgctgacatc

SEQ ID NO: 63090 - DNA, 20 bp, Artificial Sequence
  chemically synthesized
ccagactgagtggcagtggg

SEQ ID NO: 63091 - DNA, 20 bp, Artificial Sequence
  chemically synthesized
gccagactgagtggcagtgg

SEQ ID NO: 63092 - DNA, 20 bp, Artificial Sequence
  chemically synthesized
tatgctttgccagactgagt

SEQ ID NO: 63093 - DNA, 20 bp, Artificial Sequence
  chemically synthesized
tatattgtatgctttgccag

SEQ ID NO: 63094 - DNA, 20 bp, Artificial Sequence
  chemically synthesized
ggtgcaggaaacagtgtata

SEQ ID NO: 63095 - DNA, 20 bp, Artificial Sequence
  chemically synthesized
aggtgcaggaaacagtgtat

SEQ ID NO: 63096 - DNA, 20 bp, Artificial Sequence
  chemically synthesized
taggtgcaggaaacagtgta

SEQ ID NO: 63097 - DNA, 20 bp, Artificial Sequence
  chemically synthesized
ctaaaacacagccattttag

SEQ ID NO: 63098 - DNA, 20 bp, Artificial Sequence
  chemically synthesized
caaagcaactctgccccata

SEQ ID NO: 63099 - DNA, 20 bp, Artificial Sequence
  chemically synthesized
gttacaaagcaactctgccc

SEQ ID NO: 63100 - DNA, 20 bp, Artificial Sequence
  chemically synthesized
ttggttacaaagcaactctg

SEQ ID NO: 63101 - DNA, 20 bp, Artificial Sequence
  chemically synthesized
cttggttacaaagcaactct

SEQ ID NO: 63102 - DNA, 20 bp, Artificial Sequence
  chemically synthesized
tcttggttacaaagcaactc

SEQ ID NO: 63103 - DNA, 20 bp, Artificial Sequence
  chemically synthesized
ttcttggttacaaagcaact

SEQ ID NO: 63104 - DNA, 20 bp, Artificial Sequence
  chemically synthesized
aagggaatttttcttggtta

SEQ ID NO: 63105 - DNA, 20 bp, Artificial Sequence
  chemically synthesized
taagtcattgaagggaattt

SEQ ID NO: 63106 - DNA, 20 bp, Artificial Sequence
  chemically synthesized
ataagtcattgaagggaatt

SEQ ID NO: 63107 - DNA, 20 bp, Artificial Sequence
  chemically synthesized
tataagtcattgaagggaat

SEQ ID NO: 63108 - DNA, 20 bp, Artificial Sequence
  chemically synthesized
taaaatgccatcacatttta

SEQ ID NO: 63109 - DNA, 20 bp, Artificial Sequence
  chemically synthesized
gtaaaatgccatcacatttt

SEQ ID NO: 63110 - DNA, 20 bp, Artificial Sequence
  chemically synthesized
tgtaaaatgccatcacattt

SEQ ID NO: 63111 - DNA, 20 bp, Artificial Sequence
  chemically synthesized
ttgtaaaatgccatcacatt

SEQ ID NO: 63112 - DNA, 20 bp, Artificial Sequence
  chemically synthesized
tttttgtaaaatgccatcac

SEQ ID NO: 63113 - DNA, 20 bp, Artificial Sequence
  chemically synthesized
agctcacgtcatgtagaata

SEQ ID NO: 63114 - DNA, 20 bp, Artificial Sequence
  chemically synthesized
cagctcacgtcatgtagaat

SEQ ID NO: 63115 - DNA, 20 bp, Artificial Sequence
  chemically synthesized
tcagctcacgtcatgtagaa

SEQ ID NO: 63116 - DNA, 20 bp, Artificial Sequence
  chemically synthesized
ttcagctcacgtcatgtaga

SEQ ID NO: 63117 - DNA, 20 bp, Artificial Sequence
  chemically synthesized
gccaagaatttttcagctca

SEQ ID NO: 63118 - DNA, 20 bp, Artificial Sequence
  chemically synthesized
actactcttagccaagaatt

SEQ ID NO: 63119 - DNA, 20 bp, Artificial Sequence
  chemically synthesized
accactgtgtacattaacta

SEQ ID NO: 63120 - DNA, 20 bp, Artificial Sequence
  chemically synthesized
aacgcacatctgtccagctc

SEQ ID NO: 63121 - DNA, 20 bp, Artificial Sequence
  chemically synthesized
aaacgcacatctgtccagct

SEQ ID NO: 63122 - DNA, 20 bp, Artificial Sequence
  chemically synthesized
cctacctgacagaggaccac

SEQ ID NO: 63123 - DNA, 20 bp, Artificial Sequence
  chemically synthesized
gagaagttgcctacctgaca

SEQ ID NO: 63124 - DNA, 20 bp, Artificial Sequence
  chemically synthesized
gaacacatgtcttagagaag

SEQ ID NO: 63125 - DNA, 20 bp, Artificial Sequence
  chemically synthesized
catattagaacacatgtctt

SEQ ID NO: 63126 - DNA, 20 bp, Artificial Sequence
  chemically synthesized
acatattagaacacatgtct

SEQ ID NO: 63127 - DNA, 20 bp, Artificial Sequence
  chemically synthesized
ctcatagcacgagtttacat

SEQ ID NO: 63128 - DNA, 20 bp, Artificial Sequence
  chemically synthesized
agtgattgctcatagcacga

SEQ ID NO: 63129 - DNA, 20 bp, Artificial Sequence
  chemically synthesized
taaatatccattcagtgatt

SEQ ID NO: 63130 - DNA, 20 bp, Artificial Sequence
  chemically synthesized
gtaaatatccattcagtgat

SEQ ID NO: 63131 - DNA, 20 bp, Artificial Sequence
  chemically synthesized
taagctacctctttgtaaat

SEQ ID NO: 63132 - DNA, 20 bp, Artificial Sequence
  chemically synthesized
ctgtgttctaagctacctct

SEQ ID NO: 63133 - DNA, 20 bp, Artificial Sequence
  chemically synthesized
aatccttactgtgttctaag

SEQ ID NO: 63134 - DNA, 20 bp, Artificial Sequence
  chemically synthesized
tactcatagctaatccctat

SEQ ID NO: 63135 - DNA, 20 bp, Artificial Sequence
  chemically synthesized
tcagaaaatattatactcat

SEQ ID NO: 63136 - DNA, 20 bp, Artificial Sequence
  chemically synthesized
ctcagaaaatattatactca

SEQ ID NO: 63137 - DNA, 20 bp, Artificial Sequence
  chemically synthesized
tttctcagaaaatattatac

SEQ ID NO: 63138 - DNA, 20 bp, Artificial Sequence
  chemically synthesized
cttatttctcagaaaatatt

SEQ ID NO: 63139 - DNA, 20 bp, Artificial Sequence
  chemically synthesized
attacttatttctcagaaaa

SEQ ID NO: 63140 - DNA, 20 bp, Artificial Sequence
  chemically synthesized
cattacttatttctcagaaa

SEQ ID NO: 63141 - DNA, 20 bp, Artificial Sequence
  chemically synthesized
tcattacttatttctcagaa

SEQ ID NO: 63142 - DNA, 20 bp, Artificial Sequence
  chemically synthesized
ccttttcattacttatttct

SEQ ID NO: 63143 - DNA, 20 bp, Artificial Sequence
  chemically synthesized
accttttcattacttatttc

SEQ ID NO: 63144 - DNA, 20 bp, Artificial Sequence
  chemically synthesized
taccttttcattacttattt

SEQ ID NO: 63145 - DNA, 20 bp, Artificial Sequence
  chemically synthesized
ttttaccttttcattactta

SEQ ID NO: 63146 - DNA, 20 bp, Artificial Sequence
  chemically synthesized
ttattttaccttttcattac

SEQ ID NO: 63147 - DNA, 20 bp, Artificial Sequence
  chemically synthesized
gaattcttattttacctttt

SEQ ID NO: 63148 - DNA, 20 bp, Artificial Sequence
  chemically synthesized
agaattagaattcttatttt

SEQ ID NO: 63149 - DNA, 20 bp, Artificial Sequence
  chemically synthesized
cagaattagaattcttattt

SEQ ID NO: 63150 - DNA, 20 bp, Artificial Sequence
  chemically synthesized
tcagaattagaattcttatt

SEQ ID NO: 63151 - DNA, 20 bp, Artificial Sequence
  chemically synthesized
atgtatattttcagaattag

SEQ ID NO: 63152 - DNA, 20 bp, Artificial Sequence
  chemically synthesized
catgtatattttcagaatta

SEQ ID NO: 63153 - DNA, 20 bp, Artificial Sequence
  chemically synthesized
aagagaagctcaaatgtttc

SEQ ID NO: 63154 - DNA, 20 bp, Artificial Sequence
  chemically synthesized
aaagagaagctcaaatgttt

SEQ ID NO: 63155 - DNA, 20 bp, Artificial Sequence
  chemically synthesized
taaagagaagctcaaatgtt

SEQ ID NO: 63156 - DNA, 20 bp, Artificial Sequence
  chemically synthesized
ttaaagagaagctcaaatgt

SEQ ID NO: 63157 - DNA, 20 bp, Artificial Sequence
  chemically synthesized
acataaactttttaaagaga

SEQ ID NO: 63158 - DNA, 20 bp, Artificial Sequence
  chemically synthesized
taacaccgtcaattgacata

SEQ ID NO: 63159 - DNA, 20 bp, Artificial Sequence
  chemically synthesized
aaaaccatagtaattataac

SEQ ID NO: 63160 - DNA, 20 bp, Artificial Sequence
  chemically synthesized
caaaaccatagtaattataa

SEQ ID NO: 63161 - DNA, 20 bp, Artificial Sequence
  chemically synthesized
aaaagctctatgtaatttca

SEQ ID NO: 63162 - DNA, 20 bp, Artificial Sequence
  chemically synthesized
ttcaaaagctctatgtaatt

SEQ ID NO: 63163 - DNA, 20 bp, Artificial Sequence
  chemically synthesized
actcattattcaaaagctct

SEQ ID NO: 63164 - DNA, 20 bp, Artificial Sequence
  chemically synthesized
aagaataatagattaactca

SEQ ID NO: 63165 - DNA, 20 bp, Artificial Sequence
  chemically synthesized
aaagaataatagattaactc

SEQ ID NO: 63166 - DNA, 20 bp, Artificial Sequence
  chemically synthesized
agcatttaaagaataataga

SEQ ID NO: 63167 - DNA, 20 bp, Artificial Sequence
  chemically synthesized
ttgagcatttaaagaataat

SEQ ID NO: 63168 - DNA, 20 bp, Artificial Sequence
  chemically synthesized
attattgagcatttaaagaa

SEQ ID NO: 63169 - DNA, 20 bp, Artificial Sequence
  chemically synthesized
aatatgaataatattaatta

SEQ ID NO: 63170 - DNA, 20 bp, Artificial Sequence
  chemically synthesized
aaatatgaataatattaatt

SEQ ID NO: 63171 - DNA, 20 bp, Artificial Sequence
  chemically synthesized
tggataaatatgtctagata

SEQ ID NO: 63172 - DNA, 20 bp, Artificial Sequence
  chemically synthesized
atggataaatatgtctagat

SEQ ID NO: 63173 - DNA, 20 bp, Artificial Sequence
  chemically synthesized
tatggataaatatgtctaga

SEQ ID NO: 63174 - DNA, 20 bp, Artificial Sequence
  chemically synthesized
ttatggataaatatgtctag

SEQ ID NO: 63175 - DNA, 20 bp, Artificial Sequence
  chemically synthesized
aatttttatggataaatatg

SEQ ID NO: 63176 - DNA, 20 bp, Artificial Sequence
  chemically synthesized
aaatttttatggataaatat

SEQ ID NO: 63177 - DNA, 20 bp, Artificial Sequence
  chemically synthesized
cacacaatttaaatttttat

SEQ ID NO: 63178 - DNA, 20 bp, Artificial Sequence
  chemically synthesized
cctatgatacatattccaca

SEQ ID NO: 63179 - DNA, 20 bp, Artificial Sequence
  chemically synthesized
tagatgacactggcttgcct

SEQ ID NO: 63180 - DNA, 20 bp, Artificial Sequence
  chemically synthesized
agtaggaagaagacttctag

SEQ ID NO: 63181 - DNA, 20 bp, Artificial Sequence
  chemically synthesized
atcaactaactccattcagt

SEQ ID NO: 63182 - DNA, 20 bp, Artificial Sequence
  chemically synthesized
cactattaatcaactaactc

SEQ ID NO: 63183 - DNA, 20 bp, Artificial Sequence
  chemically synthesized
acactattaatcaactaact

SEQ ID NO: 63184 - DNA, 20 bp, Artificial Sequence
  chemically synthesized
aaaatccaaatcatttacac

SEQ ID NO: 63185 - DNA, 20 bp, Artificial Sequence
  chemically synthesized
aaaaatccaaatcatttaca

SEQ ID NO: 63186 - DNA, 20 bp, Artificial Sequence
  chemically synthesized
taaaaatccaaatcatttac

SEQ ID NO: 63187 - DNA, 20 bp, Artificial Sequence
  chemically synthesized
ttaaaaatccaaatcattta

SEQ ID NO: 63188 - DNA, 20 bp, Artificial Sequence
  chemically synthesized
tgatcatcacaaggatgatc

SEQ ID NO: 63189 - DNA, 20 bp, Artificial Sequence
  chemically synthesized
ctgatcatcacaaggatgat

SEQ ID NO: 63190 - DNA, 20 bp, Artificial Sequence
  chemically synthesized
tctgatcatcacaaggatga

SEQ ID NO: 63191 - DNA, 20 bp, Artificial Sequence
  chemically synthesized
tcaattttctgatcatcaca

SEQ ID NO: 63192 - DNA, 20 bp, Artificial Sequence
  chemically synthesized
aaagttgtcaattttctgat

SEQ ID NO: 63193 - DNA, 20 bp, Artificial Sequence
  chemically synthesized
ttgaaagttgtcaattttct

SEQ ID NO: 63194 - DNA, 20 bp, Artificial Sequence
  chemically synthesized
ctgcttgttgaaagttgtca

SEQ ID NO: 63195 - DNA, 20 bp, Artificial Sequence
  chemically synthesized
agttgctgcttgttgaaagt

SEQ ID NO: 63196 - DNA, 20 bp, Artificial Sequence
  chemically synthesized
acattcagttgctgcttgtt

SEQ ID NO: 63197 - DNA, 20 bp, Artificial Sequence
  chemically synthesized
gggtataggaattcacattc

SEQ ID NO: 63198 - DNA, 20 bp, Artificial Sequence
  chemically synthesized
ggggtataggaattcacatt

SEQ ID NO: 63199 - DNA, 20 bp, Artificial Sequence
  chemically synthesized
ccagtttggggtataggaat

SEQ ID NO: 63200 - DNA, 20 bp, Artificial Sequence
  chemically synthesized
cgtcaaaatacttcccagtt

SEQ ID NO: 63201 - DNA, 20 bp, Artificial Sequence
  chemically synthesized
acatgattacgtcaaaatac

SEQ ID NO: 63202 - DNA, 20 bp, Artificial Sequence
  chemically synthesized
ccctattcacatgattacgt

SEQ ID NO: 63203 - DNA, 20 bp, Artificial Sequence
  chemically synthesized
gaagatgtataattacccta

SEQ ID NO: 63204 - DNA, 20 bp, Artificial Sequence
  chemically synthesized
agaagatgtataattaccct

SEQ ID NO: 63205 - DNA, 20 bp, Artificial Sequence
  chemically synthesized
tagaagatgtataattaccc

SEQ ID NO: 63206 - DNA, 20 bp, Artificial Sequence
  chemically synthesized
ttagaagatgtataattacc

SEQ ID NO: 63207 - DNA, 20 bp, Artificial Sequence
  chemically synthesized
tttagaagatgtataattac

SEQ ID NO: 63208 - DNA, 20 bp, Artificial Sequence
  chemically synthesized
agattttttagaagatgtat

SEQ ID NO: 63209 - DNA, 20 bp, Artificial Sequence
  chemically synthesized
cagattttttagaagatgta

SEQ ID NO: 63210 - DNA, 20 bp, Artificial Sequence
  chemically synthesized
agtttcagattttttagaag

SEQ ID NO: 63211 - DNA, 20 bp, Artificial Sequence
  chemically synthesized
aagtttcagattttttagaa

SEQ ID NO: 63212 - DNA, 20 bp, Artificial Sequence
  chemically synthesized
taagtttcagattttttaga

SEQ ID NO: 63213 - DNA, 20 bp, Artificial Sequence
  chemically synthesized
ttaagtttcagattttttag

SEQ ID NO: 63214 - DNA, 20 bp, Artificial Sequence
  chemically synthesized
actccaactttttaagtttc

SEQ ID NO: 63215 - DNA, 20 bp, Artificial Sequence
  chemically synthesized
cactccaactttttaagttt

SEQ ID NO: 63216 - DNA, 20 bp, Artificial Sequence
  chemically synthesized
tcactccaactttttaagtt

SEQ ID NO: 63217 - DNA, 20 bp, Artificial Sequence
  chemically synthesized
aaagctgggttttcactcca

SEQ ID NO: 63218 - DNA, 20 bp, Artificial Sequence
  chemically synthesized
aaatatataagaatgctagt

SEQ ID NO: 63219 - DNA, 20 bp, Artificial Sequence
  chemically synthesized
aaaatatataagaatgctag

SEQ ID NO: 63220 - DNA, 20 bp, Artificial Sequence
  chemically synthesized
taaaatatataagaatgcta

SEQ ID NO: 63221 - DNA, 20 bp, Artificial Sequence
  chemically synthesized
ttaaaatatataagaatgct

SEQ ID NO: 63222 - DNA, 20 bp, Artificial Sequence
  chemically synthesized
accctggtgatcatactatt

SEQ ID NO: 63223 - DNA, 20 bp, Artificial Sequence
  chemically synthesized
atgtcatctatactcactag

SEQ ID NO: 63224 - DNA, 20 bp, Artificial Sequence
  chemically synthesized
catgtcatctatactcacta

SEQ ID NO: 63225 - DNA, 20 bp, Artificial Sequence
  chemically synthesized
ctctctttcatgtcatctat

SEQ ID NO: 63226 - DNA, 20 bp, Artificial Sequence
  chemically synthesized
cacaaagactgatgggaggc

SEQ ID NO: 63227 - DNA, 20 bp, Artificial Sequence
  chemically synthesized
ccacaaagactgatgggagg

SEQ ID NO: 63228 - DNA, 20 bp, Artificial Sequence
  chemically synthesized
gatttccacaaagactgatg

SEQ ID NO: 63229 - DNA, 20 bp, Artificial Sequence
  chemically synthesized
ccttggatttccacaaagac

SEQ ID NO: 63230 - DNA, 20 bp, Artificial Sequence
  chemically synthesized
gccttggatttccacaaaga

SEQ ID NO: 63231 - DNA, 20 bp, Artificial Sequence
  chemically synthesized
tatgctaaactttgccttgg

SEQ ID NO: 63232 - DNA, 20 bp, Artificial Sequence
  chemically synthesized
ttctatgctaaactttgcct

SEQ ID NO: 63233 - DNA, 20 bp, Artificial Sequence
  chemically synthesized
ttattctatgctaaactttg

SEQ ID NO: 63234 - DNA, 20 bp, Artificial Sequence
  chemically synthesized
tgggggatgattattattct

SEQ ID NO: 63235 - DNA, 20 bp, Artificial Sequence
  chemically synthesized
atgggggatgattattattc

SEQ ID NO: 63236 - DNA, 20 bp, Artificial Sequence
  chemically synthesized
cagtatatgactcactttat

SEQ ID NO: 63237 - DNA, 20 bp, Artificial Sequence
  chemically synthesized
acagtatatgactcacttta

SEQ ID NO: 63238 - DNA, 20 bp, Artificial Sequence
  chemically synthesized
tacagtatatgactcacttt

SEQ ID NO: 63239 - DNA, 20 bp, Artificial Sequence
  chemically synthesized
ttacagtatatgactcactt

SEQ ID NO: 63240 - DNA, 20 bp, Artificial Sequence
  chemically synthesized
tttacagtatatgactcact

SEQ ID NO: 63241 - DNA, 20 bp, Artificial Sequence
  chemically synthesized
acattttttacagtatatga

SEQ ID NO: 63242 - DNA, 20 bp, Artificial Sequence
  chemically synthesized
gacattttttacagtatatg

SEQ ID NO: 63243 - DNA, 20 bp, Artificial Sequence
  chemically synthesized
tcagagagtttgacattttt

SEQ ID NO: 63244 - DNA, 20 bp, Artificial Sequence
  chemically synthesized
agggaattgtcagagagttt

SEQ ID NO: 63245 - DNA, 20 bp, Artificial Sequence
  chemically synthesized
tcattaagggaattgtcaga

SEQ ID NO: 63246 - DNA, 20 bp, Artificial Sequence
  chemically synthesized
ctcattaagggaattgtcag

SEQ ID NO: 63247 - DNA, 20 bp, Artificial Sequence
  chemically synthesized
tctcattaagggaattgtca

SEQ ID NO: 63248 - DNA, 20 bp, Artificial Sequence
  chemically synthesized
cgaaggatggaaatccctag

SEQ ID NO: 63249 - DNA, 20 bp, Artificial Sequence
  chemically synthesized
agtcatgtaattacgaagga

SEQ ID NO: 63250 - DNA, 20 bp, Artificial Sequence
  chemically synthesized
gagtcatgtaattacgaagg

SEQ ID NO: 63251 - DNA, 20 bp, Artificial Sequence
  chemically synthesized
tgagtcatgtaattacgaag

SEQ ID NO: 63252 - DNA, 20 bp, Artificial Sequence
  chemically synthesized
tgcattttgagtcatgtaat

SEQ ID NO: 63253 - DNA, 20 bp, Artificial Sequence
  chemically synthesized
gctatagacaatatcaaaca

SEQ ID NO: 63254 - DNA, 20 bp, Artificial Sequence
  chemically synthesized
ggctatagacaatatcaaac

SEQ ID NO: 63255 - DNA, 20 bp, Artificial Sequence
  chemically synthesized
aaaactatttggctatagac

SEQ ID NO: 63256 - DNA, 20 bp, Artificial Sequence
  chemically synthesized
agagttaaaaactatttggc

SEQ ID NO: 63257 - DNA, 20 bp, Artificial Sequence
  chemically synthesized
aagagttaaaaactatttgg

SEQ ID NO: 63258 - DNA, 20 bp, Artificial Sequence
  chemically synthesized
tctttaagagttaaaaacta

SEQ ID NO: 63259 - DNA, 20 bp, Artificial Sequence
  chemically synthesized
ctctttaagagttaaaaact

SEQ ID NO: 63260 - DNA, 20 bp, Artificial Sequence
  chemically synthesized
agccctttctctttaagagt

SEQ ID NO: 63261 - DNA, 20 bp, Artificial Sequence
  chemically synthesized
ctcctgcaaattaagccctt

SEQ ID NO: 63262 - DNA, 20 bp, Artificial Sequence
  chemically synthesized
gaccatcaacttgctcctgc

SEQ ID NO: 63263 - DNA, 20 bp, Artificial Sequence
  chemically synthesized
agaccatcaacttgctcctg

SEQ ID NO: 63264 - DNA, 20 bp, Artificial Sequence
  chemically synthesized
taacagcagcaggaggcatg

SEQ ID NO: 63265 - DNA, 20 bp, Artificial Sequence
  chemically synthesized
taacaaaactaggcagaagc

SEQ ID NO: 63266 - DNA, 20 bp, Artificial Sequence
  chemically synthesized
taattataacaaaactaggc

SEQ ID NO: 63267 - DNA, 20 bp, Artificial Sequence
  chemically synthesized
gtaccgagaagccaaccctg

SEQ ID NO: 63268 - DNA, 20 bp, Artificial Sequence
  chemically synthesized
ggatctaaaaaacttagtac

SEQ ID NO: 63269 - DNA, 20 bp, Artificial Sequence
  chemically synthesized
gggatctaaaaaacttagta

SEQ ID NO: 63270 - DNA, 20 bp, Artificial Sequence
  chemically synthesized
tgggatctaaaaaacttagt

SEQ ID NO: 63271 - DNA, 20 bp, Artificial Sequence
  chemically synthesized
ttgggatctaaaaaacttag

SEQ ID NO: 63272 - DNA, 20 bp, Artificial Sequence
  chemically synthesized
tttttgggatctaaaaaact

SEQ ID NO: 63273 - DNA, 20 bp, Artificial Sequence
  chemically synthesized
gccatatgtaataattcttt

SEQ ID NO: 63274 - DNA, 20 bp, Artificial Sequence
  chemically synthesized
cctccacaccaacaaattgg

SEQ ID NO: 63275 - DNA, 20 bp, Artificial Sequence
  chemically synthesized
aaatacactgaattgcctcc

SEQ ID NO: 63276 - DNA, 20 bp, Artificial Sequence
  chemically synthesized
ctcattgaaatacactgaat

SEQ ID NO: 63277 - DNA, 20 bp, Artificial Sequence
  chemically synthesized
actcattgaaatacactgaa

SEQ ID NO: 63278 - DNA, 20 bp, Artificial Sequence
  chemically synthesized
agtaaataactgactagaga

SEQ ID NO: 63279 - DNA, 20 bp, Artificial Sequence
  chemically synthesized
aagtaaataactgactagag

SEQ ID NO: 63280 - DNA, 20 bp, Artificial Sequence
  chemically synthesized
taagtaaataactgactaga

SEQ ID NO: 63281 - DNA, 20 bp, Artificial Sequence
  chemically synthesized
tgtgagattttaagtaaata

SEQ ID NO: 63282 - DNA, 20 bp, Artificial Sequence
  chemically synthesized
atgtgagattttaagtaaat

SEQ ID NO: 63283 - DNA, 20 bp, Artificial Sequence
  chemically synthesized
agagatttatgtgagatttt

SEQ ID NO: 63284 - DNA, 20 bp, Artificial Sequence
  chemically synthesized
gagagatttatgtgagattt

SEQ ID NO: 63285 - DNA, 20 bp, Artificial Sequence
  chemically synthesized
tgagagatttatgtgagatt

SEQ ID NO: 63286 - DNA, 20 bp, Artificial Sequence
  chemically synthesized
gttttgagagatttatgtga

SEQ ID NO: 63287 - DNA, 20 bp, Artificial Sequence
  chemically synthesized
agttttgagagatttatgtg

SEQ ID NO: 63288 - DNA, 20 bp, Artificial Sequence
  chemically synthesized
aaaatactttagttttgaga

SEQ ID NO: 63289 - DNA, 20 bp, Artificial Sequence
  chemically synthesized
caaaatactttagttttgag

SEQ ID NO: 63290 - DNA, 20 bp, Artificial Sequence
  chemically synthesized
tcaaaatactttagttttga

SEQ ID NO: 63291 - DNA, 20 bp, Artificial Sequence
  chemically synthesized
aaagtgttttcaaaatactt

SEQ ID NO: 63292 - DNA, 20 bp, Artificial Sequence
  chemically synthesized
gaaagtgttttcaaaatact

SEQ ID NO: 63293 - DNA, 20 bp, Artificial Sequence
  chemically synthesized
tgaaagtgttttcaaaatac

SEQ ID NO: 63294 - DNA, 20 bp, Artificial Sequence
  chemically synthesized
agtgaccagtgctatatcct

SEQ ID NO: 63295 - DNA, 20 bp, Artificial Sequence
  chemically synthesized
tcttcagtgaccagtgctat

SEQ ID NO: 63296 - DNA, 20 bp, Artificial Sequence
  chemically synthesized
gtcttcagtgaccagtgcta

SEQ ID NO: 63297 - DNA, 20 bp, Artificial Sequence
  chemically synthesized
aggataaggtaatgtacaga

SEQ ID NO: 63298 - DNA, 20 bp, Artificial Sequence
  chemically synthesized
caggataaggtaatgtacag

SEQ ID NO: 63299 - DNA, 20 bp, Artificial Sequence
  chemically synthesized
agaaatcctgaaagcataac

SEQ ID NO: 63300 - DNA, 20 bp, Artificial Sequence
  chemically synthesized
aagaaatcctgaaagcataa

SEQ ID NO: 63301 - DNA, 20 bp, Artificial Sequence
  chemically synthesized
taagaaatcctgaaagcata

SEQ ID NO: 63302 - DNA, 20 bp, Artificial Sequence
  chemically synthesized
ttaagaaatcctgaaagcat

SEQ ID NO: 63303 - DNA, 20 bp, Artificial Sequence
  chemically synthesized
actttttaagaaatcctgaa

SEQ ID NO: 63304 - DNA, 20 bp, Artificial Sequence
  chemically synthesized
gactttttaagaaatcctga

SEQ ID NO: 63305 - DNA, 20 bp, Artificial Sequence
  chemically synthesized
tttgactttttaagaaatcc

SEQ ID NO: 63306 - DNA, 20 bp, Artificial Sequence
  chemically synthesized
gtttgactttttaagaaatc

SEQ ID NO: 63307 - DNA, 20 bp, Artificial Sequence
  chemically synthesized
tgtttgactttttaagaaat

SEQ ID NO: 63308 - DNA, 20 bp, Artificial Sequence
  chemically synthesized
attttgtttgactttttaag

SEQ ID NO: 63309 - DNA, 20 bp, Artificial Sequence
  chemically synthesized
tcaggagatcaaactggatt

SEQ ID NO: 63310 - DNA, 20 bp, Artificial Sequence
  chemically synthesized
ccttgtcaggagatcaaact

SEQ ID NO: 63311 - DNA, 20 bp, Artificial Sequence
  chemically synthesized
accttgtcaggagatcaaac

SEQ ID NO: 63312 - DNA, 20 bp, Artificial Sequence
  chemically synthesized
taccttgtcaggagatcaaa

SEQ ID NO: 63313 - DNA, 20 bp, Artificial Sequence
  chemically synthesized
taggaaaatgtccaaagtaa

SEQ ID NO: 63314 - DNA, 20 bp, Artificial Sequence
  chemically synthesized
caaaaagaatgctcatgtag

SEQ ID NO: 63315 - DNA, 20 bp, Artificial Sequence
  chemically synthesized
ctctgctcttacaaaaagaa

SEQ ID NO: 63316 - DNA, 20 bp, Artificial Sequence
  chemically synthesized
aatgattactctgctcttac

SEQ ID NO: 63317 - DNA, 20 bp, Artificial Sequence
  chemically synthesized
aatgttgaatgattactctg

SEQ ID NO: 63318 - DNA, 20 bp, Artificial Sequence
  chemically synthesized
actcccaagtgtagatctta

SEQ ID NO: 63319 - DNA, 20 bp, Artificial Sequence
  chemically synthesized
cactcccaagtgtagatctt

SEQ ID NO: 63320 - DNA, 20 bp, Artificial Sequence
  chemically synthesized
tcaagaaggaatgcatttca

SEQ ID NO: 63321 - DNA, 20 bp, Artificial Sequence
  chemically synthesized
taagacctcagtattctcaa

SEQ ID NO: 63322 - DNA, 20 bp, Artificial Sequence
  chemically synthesized
ataagacctcagtattctca

SEQ ID NO: 63323 - DNA, 20 bp, Artificial Sequence
  chemically synthesized
accaccatgacagggggcag

SEQ ID NO: 63324 - DNA, 20 bp, Artificial Sequence
  chemically synthesized
aaccaccatgacagggggca

SEQ ID NO: 63325 - DNA, 20 bp, Artificial Sequence
  chemically synthesized
atgtttaaccaccatgacag

SEQ ID NO: 63326 - DNA, 20 bp, Artificial Sequence
  chemically synthesized
aatgtttaaccaccatgaca

SEQ ID NO: 63327 - DNA, 20 bp, Artificial Sequence
  chemically synthesized
taatgtttaaccaccatgac

SEQ ID NO: 63328 - DNA, 20 bp, Artificial Sequence
  chemically synthesized
ttaatgtttaaccaccatga

SEQ ID NO: 63329 - DNA, 20 bp, Artificial Sequence
  chemically synthesized
tttaatgtttaaccaccatg

SEQ ID NO: 63330 - DNA, 20 bp, Artificial Sequence
  chemically synthesized
ttttaatgtttaaccaccat

SEQ ID NO: 63331 - DNA, 20 bp, Artificial Sequence
  chemically synthesized
tttttaatgtttaaccacca

SEQ ID NO: 63332 - DNA, 20 bp, Artificial Sequence
  chemically synthesized
agtcattttttttaatgttt

SEQ ID NO: 63333 - DNA, 20 bp, Artificial Sequence
  chemically synthesized
ccacatattcagtcattttt

SEQ ID NO: 63334 - DNA, 20 bp, Artificial Sequence
  chemically synthesized
cccacatattcagtcatttt

SEQ ID NO: 63335 - DNA, 20 bp, Artificial Sequence
  chemically synthesized
agaatttcccacatattcag

SEQ ID NO: 63336 - DNA, 20 bp, Artificial Sequence
  chemically synthesized
gagaatttcccacatattca

SEQ ID NO: 63337 - DNA, 20 bp, Artificial Sequence
  chemically synthesized
aatgcagtttgagaatttcc

SEQ ID NO: 63338 - DNA, 20 bp, Artificial Sequence
  chemically synthesized
gaatgcagtttgagaatttc

SEQ ID NO: 63339 - DNA, 20 bp, Artificial Sequence
  chemically synthesized
cctaacagacctgagtcagg

SEQ ID NO: 63340 - DNA, 20 bp, Artificial Sequence
  chemically synthesized
agttccctaacagacctgag

SEQ ID NO: 63341 - DNA, 20 bp, Artificial Sequence
  chemically synthesized
ttcagttccctaacagacct

SEQ ID NO: 63342 - DNA, 20 bp, Artificial Sequence
  chemically synthesized
aggttattcagttccctaac

SEQ ID NO: 63343 - DNA, 20 bp, Artificial Sequence
  chemically synthesized
caggttattcagttccctaa

SEQ ID NO: 63344 - DNA, 20 bp, Artificial Sequence
  chemically synthesized
tctgtagcatggtttcaggt

SEQ ID NO: 63345 - DNA, 20 bp, Artificial Sequence
  chemically synthesized
gattatctgtagcatggttt

SEQ ID NO: 63346 - DNA, 20 bp, Artificial Sequence
  chemically synthesized
ggattatctgtagcatggtt

SEQ ID NO: 63347 - DNA, 20 bp, Artificial Sequence
  chemically synthesized
tggattatctgtagcatggt

SEQ ID NO: 63348 - DNA, 20 bp, Artificial Sequence
  chemically synthesized
tggattttggattatctgta

SEQ ID NO: 63349 - DNA, 20 bp, Artificial Sequence
  chemically synthesized
ttatggattttggattatct

SEQ ID NO: 63350 - DNA, 20 bp, Artificial Sequence
  chemically synthesized
cttatggattttggattatc

SEQ ID NO: 63351 - DNA, 20 bp, Artificial Sequence
  chemically synthesized
tcttatggattttggattat

SEQ ID NO: 63352 - DNA, 20 bp, Artificial Sequence
  chemically synthesized
taagttttcttatggatttt

SEQ ID NO: 63353 - DNA, 20 bp, Artificial Sequence
  chemically synthesized
ctaagttttcttatggattt

SEQ ID NO: 63354 - DNA, 20 bp, Artificial Sequence
  chemically synthesized
tggagaaagtggctatgctc

SEQ ID NO: 63355 - DNA, 20 bp, Artificial Sequence
  chemically synthesized
ctggagaaagtggctatgct

SEQ ID NO: 63356 - DNA, 20 bp, Artificial Sequence
  chemically synthesized
aagtcgtttctggagaaagt

SEQ ID NO: 63357 - DNA, 20 bp, Artificial Sequence
  chemically synthesized
cttcaagtcgtttctggaga

SEQ ID NO: 63358 - DNA, 20 bp, Artificial Sequence
  chemically synthesized
acttcaagtcgtttctggag

SEQ ID NO: 63359 - DNA, 20 bp, Artificial Sequence
  chemically synthesized
tttacttcaagtcgtttctg

SEQ ID NO: 63360 - DNA, 20 bp, Artificial Sequence
  chemically synthesized
ctttacttcaagtcgtttct

SEQ ID NO: 63361 - DNA, 20 bp, Artificial Sequence
  chemically synthesized
tctttacttcaagtcgtttc

SEQ ID NO: 63362 - DNA, 20 bp, Artificial Sequence
  chemically synthesized
ttctttacttcaagtcgttt

SEQ ID NO: 63363 - DNA, 20 bp, Artificial Sequence
  chemically synthesized
tttctttacttcaagtcgtt

SEQ ID NO: 63364 - DNA, 20 bp, Artificial Sequence
  chemically synthesized
gcatggttttttctttactt

SEQ ID NO: 63365 - DNA, 20 bp, Artificial Sequence
  chemically synthesized
ggcatggttttttctttact

SEQ ID NO: 63366 - DNA, 20 bp, Artificial Sequence
  chemically synthesized
tggcatggttttttctttac

SEQ ID NO: 63367 - DNA, 20 bp, Artificial Sequence
  chemically synthesized
taggtacaacttttggcatg

SEQ ID NO: 63368 - DNA, 20 bp, Artificial Sequence
  chemically synthesized
atacacactggctcacacat

SEQ ID NO: 63369 - DNA, 20 bp, Artificial Sequence
  chemically synthesized
catacacactggctcacaca

SEQ ID NO: 63370 - DNA, 20 bp, Artificial Sequence
  chemically synthesized
atttcatacacactggctca

SEQ ID NO: 63371 - DNA, 20 bp, Artificial Sequence
  chemically synthesized
ctctcattcatttcatacac

SEQ ID NO: 63372 - DNA, 20 bp, Artificial Sequence
  chemically synthesized
ctcttactctcattcatttc

SEQ ID NO: 63373 - DNA, 20 bp, Artificial Sequence
  chemically synthesized
ctccctccctcccttcctct

SEQ ID NO: 63374 - DNA, 20 bp, Artificial Sequence
  chemically synthesized
tctgtcttcctccctccctc

SEQ ID NO: 63375 - DNA, 20 bp, Artificial Sequence
  chemically synthesized
gataagtataaagccctaga
